United States Patent Application Publication US 2015/0354009 A1 - sequence listing, part 5

SEQ ID NO: 98 - DNA, 30225 bp, Homo sapiens
ggcagagcgcggcgcggggccggcggcgaaggtccggggtggaatcgacgtcgctgcggctgccgacgacccacacccggccggccgcctccgcagacccaccttggccgcgcggcagggggcgcgcagagccccgagggagcgagtccccgcgcgtggcagctcggcggcttctcccttcgggaggtccggctcccggctctccggacccgcctggcgtcctcgcctgcggcggggcggacgacagcggcgcccaggaatggcttcggcgggcagcggcatggaggaggtgcgcgtgtcggtgctgacccccttgaagctggtcgggctggtgtgcatcttcctggcgctgtgtctggacctgggggcggtgctgagcccggcctgggtcacagctgaccaccagtactacctgtcgttgtgggagtcctgccggaaacccgccagcttggacatctggcactgcgagtccacgctcagcagcggtgagggcctggcgcgccgcgacccctgcctcccgccccggactgccccgcgccccactgccaggacagtcaccgcctgtccccacgtccccgcatcctctgccctggcccgtcccaccccgtccaggcccttctcggatcctggggctcccgccacctccctggcatccacccctcttccctccccatccctggtcgccaaacctaaagcgacagcccacgccctctcccttccccgtggccattcctcctgttctggagtaacacgtacgctattttgggtatttgttatcatttgaggcgagagccatgtggctgtgtaaaaaaatgcgacgccttccacacccccgttaaaaaagaagcaggcaaaaacgccccaactccaccgagatgctgcgggggttcgctgttcggtcttccccactctttttccttcctctctcgaggacgaatttgcctagtgttcacatttctgccggttccactccaccttatctgcgttttcaccaatgtatttcggtttggattttatttccttacgtttttgatggatatgaagagttgagagagggacaggcttgttttcctttccttttttggtgacgccgccgttgattgtgagttgcctttctttctctgccactctaagtaactcttctctcctccagacctttcttttctccatgagctactcacagatgcctagaaagttgtgctttattccgccagcgctgaaagctgcaaatggataagatgggggtggggagtggagaataaggtagctactgaggctaccagtcccagggggctttactgctttccgccctccctgaccctccagttgccttccccggcgccccagttatgcccttagcaaaaatcagtcaacttatgatttctcgctacaaaccccttcctttctaattttgattcttcaactgctggtgtcagcgaagagaaagggaaataaagagagaggacctgccggcgattttctttctttctctctctttctctctctctctctcacacacacatacacagactcacacacacacacatagacacctgagaaactcattacattccttccagtttcatgtcttctctgggactatttataaagctttcctggaaacgtttcaagttgtaacaaagttgaaatagcacaaaaagccacaaaaatctgattttcttttgtctttggtttcctgttataacacaggaaaatttgaccaagtttcttctgtaaatttaattttgtgtttaaaaaaggctttttctttgatactacctcaaaattcccattgaagggtttcctctttgttggttaattcactgtggagggaactggttggcagcaggaggtcaacatttaggtccttcaattctttcagggttggcagtttacaactaaagataaaataaatcggcagaatttctttcttcggtaaccaggggatccaaataaactttggcgaaaatatctcctttcccctcttcaataataaaatttatgtaggaatgacagctactgcacgactccttggcaacgtgaatgttttgcccctttctctctgtctcctgaaataatagacccctgattgcataaagacttttcagataggttagagaaaccagtttcaactcacatttgcttttcaagccagtacccttttttcttggccaggaatgtagggaatggggagaagccagctcgagtttgcagagcaacatacagtgtttgctaaccttttcttaattgcctccatacccatttatctcagcttttttcctctctagtcaaggaaatatggagacgcaagcctaatgcaaatatagcggtaatagcactctgcaaagtaaaaatcaaaggcaggcccagtttgggatttttccctgtttattctacccccttgctgaaagtcatagcccagcgtatatttctatttggatttctgaaaatcagctttcatcttatcttgccttaaaaaaatagttttcagcccagataaagtagaattcataagcaaatgggtaaaaagtagagatgattttgttagaggttttctggaacaagttcttgactttgtgtatatataatagcagttcattttttgctctccacggtgatggtgggacacagggcgggggtggaggaaaggaaacaagatatggaaaattgctctgtgtccccactttacaaaatgtactttcttatgttatgtgaatttgaagcttctgtccgccagtgttttgaaaggaaggggaatgcccgaatcaaaaccagcagtgcttttcttgtctgttccaaagggcaagcagcttttttcgtctgtttgctgtgtggagtagcagaaaacagggagggaaatgtcttctctgaagattttgagagatccacatctttgtctttcaaaataaattaccttgggaggaaccaccaaggacacttttactgaaggcccttcaccaggatctttaaggcttaattaaaaatgtttgtcttaattagaattaaaactgctgtgaagaggcaggcctgtatttactgaaggagcatttcaggaatgtttctactcacaatagtatgccctacttagacccagtttctactgaaactttcccctaagccattatttttaaacttgcattttaattttggtaccaaatgtgcatcatttgctgtttataacctgttttatgattttaagcaaaagtagaaccatgcctcttgtgttctggtgtattgaaggttgcgtcagctcttctagtacgaaccactaatccggttgtcagtcagccgtaatgcttttctctggtgttccaattcaatgtatggaggacagttgaggcactcatcttaagttctaagtgttccagaaagacatatgagaaagcggctaattgactgtgattaatggtggaaagagaaaaaaaaaataaagtgtgcttgttaggaagtttagaatacgcagtactcacatggctgccggccacagaattctttctaagggtagttttccccagtactgttttggggaaccttttaataaaccttaaatcttacacaaattatagtaatattttagacttctgcttagtcacatttagtttgctaactttatttctaggatatagttgctaggatttcacagcaattacaagaatccttagtgtaaataggattggcacaagtgtatacagaatgctgatgccctaaatttgatatcaaatgtgctctataacctctaaggagactttacatttcttctttaaaatgtataaatacatagctatttcatgtaaagcagattgctttttggtgtctgtgtaatttgttgactaaggagaaagcaaggacatacagatggccaaatgaacacttttactaacagtaatttagggatataacaaattcatttttcctttttttatcccaaaatacttgatcaaatagtaccttttttcaagggatattgttaacatcattcacatactatcctaaaaatagctgcatttgtaacgtgagtcattggtagttttgaaatggcagtataccatatgctaataacaggtgaatattatcatttctaattgacaagaaattctttttagagtgctttatatgtagatctttttttaactttagtataaaaagctactttaaaaggaatttataagaaagcctatcttaggtgttaaagataaatggaactgcctaaccacctgcacgtcttagcaaatctgagatatagtgattctgagttcaaacatgtttcatctgttcatattttgcatttattccttaattcgaaaacacagtttcattaggaaacctcacaatgtgatttgctccggggaaggttcagcttgttgcttgaaatgtgttgatattgatgcatttttacaaatagctccgcaagcctggaagtcactattgttatacccacttctggcttccttgaaaagaacataagaagaataaatgcagttttgtttaacctagacatcatagacgggtggacagttaagagtaccagagagcaccaaaactttctccactgataagccagagaaaaccaagtataacttatttcaagatcttcctgatgactttctcttaatgtcttttagattttcaggttccttagatttacttttacaaaggacattttaatgtgtgaacagatataatttctcttttgctcacattcatagaaggattataattcccagggagccacttagatcagtcttggcagctaagggatttgatgggtgtgggaaaagcctggcctttcgtaaaacatttcaaaacaaaacaaaaacaaacaaaagaatatctcaagcaatagattttacttgctgtcgggaatacatttcaagaaatttcctgcaagtttttgtttaatagtaagaccacttgcagagaccatagatatagtcagtgctactagacatgctagtgaaaggaatatagatgcttcaaaatgtgtctctggaatacctaacctaaataccacagcagggagctctctgaaccacttctggttctgagggctaccccaaaataactaaccgaataaataaataaataccacaacaaacttccatgtgagctatgctaaattgtaatgtaattctgtatcagagtagagtagtatgttggagaataaatgagacattggattctaactgacctgaacttggccacttaccaatcatgtgacctcatacaacttaatgtcctcaaatggtttatcataaagattaaatatatgaaagtgcctgtttgttagtgttatgtttcttcctggttacgtattcagaaaatcccagtgatacttttttcaataattgaagatttttcccctttaagtagtaaaatctctgcattgcataatgaattgcataatgaagtactttgtcaatttcaaatttaaattttgatatgcattacctaacatttaacaatgctcttggtagatcatgatcacaaaactattatccttttattcagtcctattacaagccagacacctcagttattcccaatgtcacaataaacttgcaaggtagctaaagttatccctatatattattgaggaaactttggatttttgttaagattaccaaggtctcaattaactagtggtaaagatggattcttaccaagagtattccagttgctaatgctgggaaactaaccacaacaaaagttagtcgtgtaaaataaccattttattatactcatgaattctgtgggtcaggaattcagataggacataatgaggatggatgtctggagcccttgtggaagataacttgaatggctaggaaccagaacgtctggaactgtagggtcattttccaaatgatttcgctcacaggtttggcaccttggtggggaaggctgtgagatactgggcaaagctgtgactctccctggaatgcctacaggtggcctttctagcattgtggtcttaggatattggaattcttacaaattgagtgggtcccgcaggacaagagtcataagagccagaatctctctgaactaggctgagaaatcacacatgtcttctaccacattcagttggttacaaaggagccatatggccagcttggatttaagggaaggagaattgaataccaccttttgatggagcagtggcaagttcacattgtagaagagaatgtgggataggagttgctgttgggccgtgtttggagcacacagtctgacactgagtctaactgcaaatctgcattctttattgcctttgaagaacaacaacaacaacaacaaacggccaaccagtttgtctttgctttgtagcttctgtacttaagaactttgaattgattatataaataatgtctgactgggacaaaaccttccctcagccagcatatggctttaatgactggttacttgtactttggatatgagatggaatgaactcgagaacctaacttttccacaaacagagagatacatgtaaaaccttccaaaatctttggtttagtctcaaacaaccaaggctcaaactgattatgaatctggaatgtaatttgctactttatgttgtatgataaaattttattctttttttagaaagttatgaatgcatctgatgatacgcttgctacatgaacactaaaacattaaaattccagacaggagccaagttttatagtgctagagaagtgttggagttagagttattttttgtttgtttccttttcctttgttttaataacatagctcttctcttaactactgcccatgtattgaatctcagagttgtaacgtgtttaataaaatagacaagatttttaacataatccagtctaatcaaatttattacatgattaaggaaaatgaagaaggatacaatgttaaacactcaatagagagggtacattttgccatagtatttttggagggttggtttttaaaatgttctgtaatattgtagataactgtcacttggtgtttgaagtattgttgaatgatgtcatgtatggaagcttggatgaagaggtgaaggactgcatgtgaaatagctgcccactttttgtaagattatttatcatccatgatttgatttcacatagaattaaagtctgaaaatagaattatatgtgttgataagtacatttcagatgtttattaccatcaaatttacattttaaccatgactagtgcttaaaaataaacacttctactttaagtttctccatgatggggtacgttaaaataatggcttgggggccaggcgtggtggctcacgcctgtaatctcagcactttaggaggccgaggtgggtgaatcatgaggtcaggagttcgaggacagcctgaccaacatggtgaaaccctgtctctactaaaaatacaaaaaattggctggacgtggttgcgggctcctgtagtcccagctactcgggaggctgaggcaggagaatcgcttgaacccgggaggcagaggttgcagtgagccgagatcgtgccactgcactccagcctgggcagcagggcaagactccgtatcaaaataaatttgaaaaagcttaattttttttttaacttttattttaggttcggggtacatgtgcatgtttattatataggtaaactcatgtcaccggggtttcttctacagattatttcatcacacaggtattaagcctagtacccaatagttattatttttcctgatcctctccctcctcccaccctcaaccctcaagtagaccccagtgtctgttattcccttctttgtgttcacgagttctcatgatttagctcccacttataagtgagaacatgctgtatttggttttctgttcctgcgttagtgtgctaaggataatagcctccagctccttccatgttcccacaatatgcatgacctcggttttttttctggctgcatagtattccatggtgtatatgcgctacactttcttcatcccatctgtcatcgatggacatttaaattgattccaagtctgctattgtgagttgtgctgcaaagaacattctcctgcatgtgtctttatggtagaacaatttctgttcttttggtatatacctagtaatgggattgctgggttgaatggtagttctttttttaggtctttgagaaatcaccatactgtactgctttccacaatggttaaactaatatacactcccaataactgtgtataagtgttcccttttctccaaaaccttaccagcatctgttattttttgactttttaatagaagccattctgactggtgtgagatggtatctcattgtggttttgatttgaatttctctaatgatcagtgatattgagctttttatgcatatgcttgttggacacatgtatgtcttcttttgaaaagcgtctgttcatgtcatttgcccgttcttaatggggttgtttatttttctcttgtaaattcatttaagttctttatggatgctggctattagatctttgtcagatgaatagcttgcaaatattttgtctcattctgtaggttgtgtactctgttgatagtttcatttgctgtgcagaagctcttaactttaatttatccaatttttcaattattgattttgttgcaattgcttttggtgactttgttatgaaatctttgcccgttcctatgtccaggatggtattgcctaccttgtcttatagggttgacaacgtagtttatagtttatggttttgggttttacatttaaatctttaacccaccttgaattgattttgtatgtagtgtaagaaaggggtcaatcttctgtatatgcctaaccagttatcccagcatcatttgttgaacagggagtcttttctccattgcttgtttttctcaattttgtcaaagatcacatggttataagtgtgcagccttatttctgggctctctattctgttccattggtctatatgcctgtttttgtactactagtaccatgctcttttagttactgtagccctgttgtatagtttgaagtcaggtaatgtgatgcgaccaactttgttctttttgtttaggattgcctttgctattcgggctctttttttggttccatatgaatttgaaaataggttttctagttctgtgaagaatgccagataggaatagcattgaatctgtaaattcctttgggcagtatggccatgttaatgctattgattcttcctatccatgagcatggaatgttttcccatttgtttatgtcttctgtgctttctttgagcagtgttttataattatccctgtagatctttctcctccctggttggctgcattcctagatattttattttttttgtgtggcaattgcaaatgggattgccttcctgatttggctctcagcttggctaacaatagcttaattttaagttgaaaaagaatttccaaattttgtagaagtcaaccatgtatgtttcttaaattgattaaatgaatattaattttcattcaacaacttaattgcattctggctttattaaaagtatgtattaatttatccaaaaagattgaatgttctttcagcagaatttcaacctcacacattaaaggcactgacatttcaattttactaatcttttcaaactattggttcacctcccttgaaaattagacaaggacacctttccttaatgtttttactcctaagtttgtgtgtgatttgggtacacttgtagatcatcaattttctattctaatcatggacactgaagactctcacttaaaaaatgtacaacgaaacatccatggtcttccaaagaagtgagaaaaaatatctataacacctttgtctctatcagcttgttgactgttatgaggtttaaaatgatattttaatgagccatgtttcaagagatcacatatttatactttctgttcaaaatttctgtttattaggcaaaaccatgttaaaaaaatagaagtcgagacccctgaattacttattctctgtacataaaaagggacagacacaaaagaactaaaattttcatcaaagaagattttattgccatcatgtttaaggtccctaaaccaaatattcaccagaatgctgtcatgatgctctgtgaatgaagcctagaatctattcttagctcctctaggtaacttaaaggggggtacattcgaatgcttccctctattttcccatcttctcacatatactcaatgagttaacttcattgaaacgtagtcattggttttctagcagagggtagacattattctgatacaaagtcagccagttagtctgtgttccaggcatcgtggaaggtagtgagaataaaatgatgggtgaaacaaatggtgtcttttaaacaaattattaataattaaataaatgtgcaaagtgctgtgaaggagaaaacaaaggttctacttctgcagcggggcattaagaaggagctggtgggagtactagctttgccaattttattcctccatatttactaaaggggtatcttaatactatcgtgggtggctgtctggctttcttcattctactctttgattattcttagctcccctaaacccattacagtaactttagttgcttagaggaagtttcacccactcctaatcctggagtagtaggttttctttgtgcttttcaaaataatcaagttttccaagttgtaacctaattaggtttttattcaaagagtgaaaaaagaacaatgttcaaaataccaaagtcatcacaactttgtagaaataccatgattagaaattattattgaaaaataccagtacttgttaggtaacactagttaccatcaaatgcttatgaaaactttcaaagatggtgcatggtaagaaacagcagtcattaggggtgatagtgtctttctttttgtccaaatactggaacttgccttaacagcaaggctctttgctaaatactgtattcaagtggttttatttgaggaaaaaacaccatatgttattgtgtttagattattaattacatttccactgaattatctaagacagaattctgtgaagcagctaaaatgttccattatttgttgaaaataaaaagtatgtgtgtttttttttctaacatcaacataaaacaactccaagatcttgaatgaaattgacattgttaaacactagtaacccatctggcattttggacaaccgggattttccaaaatttggcaaaattaacacgcattttggtcgttagggttattgtatcatctgtttggatggttacctggagtcatttatgtctgtagtttaaaatcaggttagcactatactttggaggcagtctttatctgtgaacgggcctaaagggtagtattcgaaatcaaattgttgccaacctgattactactatggatatctaacatagttgctttggcaaacatctattttgctttgtttgtcacaacacacatagtatttatattgtaattttataaaatacaaataattacttgccttaaattggatggaaaggcagtatcctcatatacaaagaaatatttctttgcaagtgaaaaattatagttttgataccagttttaataaaagaagtggtcattttaattattgaaattagaatcagaattcatttggctgcctttctttgtgtctacatcacagagtggtggaaaattaatgcagtattgacaaatttaggtcagaatgcaacttagccaataaaccaagatttaagctgcctcagtaacgtttcagttttccacctcattagcacatgcagactaacttttaaaagttaagtagatcatttgatacctttagaagtagttaggctaagtttatggttctacacaaaatagcattccattctttgtgtatgaggatacaggcttcctatccaaactcagaaatgcgtagcattaatattaagataaattctttagttacatttcgtgaaaataattaaatgccataatttctgacaaagtgagctagttgggaaaaagacatagtctttggtgaatagatggataatttagggaatgtgagtttgaaatattcttctgtatctgagctttcttttttcctttagtactaaaccatcctactatttccggttcctgatgatagaatgggattggcaatactaacttaactatgttctcaacaatgtaatttaaatgttttgctataaatatgtcctacaaatgaatacaagtgtttagaaaagctgaatgtttgctgggaatgagtgaaaataatccagtctgtttgggtgaattaggaagaatttgtatataacttgtaattcaagatgataggtaaaaaaatcattgttctaagttgtctggtgaattattttattgcagttatagatatcattttagttaatataatttccttttggaggggttcaaaaatgaaaatacaagtgccagtctgacaaatgtgagtgtgatttaaaaatcagtgttttaatttgtgatgagaatgatagaaaagcgagaatcatccataaaaacaacggaatacattgaggggaatactacccacctaaacagtaggacttctgtttatgaggttaaaaacttgtttttccattgctttttaattatatctaattttctaaaggaaataggcattatgtgctcagggatttacatatagtagaaagaatctcagcatataaccagtagctacagaggtaaataaattagccagtgtttgacaagtgaaaggtttctaaatgaggtgagtggaggcagaaagctttaggaactggttttgtgcattgcccttggctcaaaaatatcgaaaatgtatccttgttaaaattttgtcttttctgaaaattggaagtgacttttgatcatgaattccctaagggaatgataattctccaattggacagttataatgtggtccatagaattttcataatgcagtggcgatttcaggccagtctcatatgttacaatgctaaaataagtcagcacaattctgcagaatactaaactgtttatagacattggaaactctgatgccagctaataaaaataccttgaaagaggacttgaaatcagttcctgagttgcatgttaatgttaaacttgatggtgtagtatagggactgcccgatttttatcttgtaactgcaaggggaatataacattatgtgtatgtattttcctggagtttttttttctttttactttttttttcctgttatagaaaacactagtagagaagcatacacttatcttgagcctccacttctttcggtgcagtttgaatgcccccagtgtgtcactgtgtcaattttgccaaaattcttttgagagaacctgacacgtaacatggcagcctgatttcaggtttggttttcagatccaaaacatgcctcccatcccattcgagccctcaccaatttatcaaccaaggatgtatgttatttcctcaaaactgattatcacctgttctctgtggtctcagaaaccaaactcaggtttccaatcagctggcgtgacattgaacaatggcccattttaattgtgcagagcactgcaatttgtaaaacagtaccatgttcattgatgttctgcaggtctggtttgtgtttactgttccactatagtattggtatattatttatagaaaggtagaaaactaatgcagagtaataaatctttacagactcttaactcatctgactaaatactgtgaaggctataattggacaactaaaattgatatagaaattaactgattgtgaaaacttaaaatgcatgacttttttgaagaaatggtgctggaaacagagaattttatgaaattttaatttgttttgcaaacactgagtgtaggttagcaggtatttgtggcatgcaaatcttttggtggaaaagtcagggtagaacaagttttctggtctcttataatattactataaaattgtccaagtcttatgtatatgttcttgctaaatctagtattggacttcggatggtaagtaaatatctgtctaactgtgtcaatgtaaagcccagcctattattttaatagccattagtaggtgtctataaaatatttttcacttttttttactccccatatcttagtcttgttcagtaagagagagggaaatggtaactggctgatttacatagtccttgattttagttcacctcttaggctggcactattatttggacaatggattctagttgtttactgaaagagatatgatgccacaggccctgtttgcagctccaaagtacccacactgaaccttgaaatgcacctcagacctccttgactatgatagccatatcgaaccactttttcagcttcctgatcgaggttaaactgatcagcaatttaaagttttggtgctgggcaactggcctgagtgaatcattccaaatggatataatgacaacaattctaaaacttggcaccattcgccagggatatagtctcaataatccagtctaagccccaggttttggccagaacagtggcagtcatggcccatttctagtttcttttggaaaataaaatagcttttctgtttgagcagtcatatctctggttgtggaccaaaggaaaggtagaaatatcacaacagtggtaatgctgatgattctccttgttgactttacatctagggtaactttgtcattagccacaacctcagtgctgaaaataaacataggacatttagaagaaaatccagaactgattatgtttatctactttttagaagtatttcctgtgctataggaggttctttttctaattaggttctagtcccttttacttttattctcctggtgctttctactatagcattttactggtttttcaaatgaaatgaagaattgctatattgaggaaatgtagcaatatgcgattaggaattttttggaattttctctcgctatattggttaagcatcactttgcactcctgtattattcatttattaaattaacttcattgtgtgttttgtagtttaaaagatctttgcctagaaaaaagttcaacatttgaaatgctaaataaagtataatggttagcaaacagcagctcagccatggagtccaaaccaactcaccacctgtttttgtagattaagttttattggggctgggtgcagtggctcacgcctgtaatcccagcactttgggaggccgaggcgggtggatcacttgaagtcaggagtttgagaccagcctggccaacatggtgaaacccagtctctactaaaaatacaaaaattaactgggcgtggtggcacatgcctgtaatccctgctactcgagaggctgaggcatgagaatcacttgaacccgggagacggaggttgcagtgagccaagatcgtgccactgcactccagcctggatgacagagtgagactctgtctcaaaaaaataaataaataagttttattggggcacagccagcttgtttacacattgtctgtggctgctttcacactatcatgcagagttgagtgggtacaacagagaccataaatcataaatccaaaaatatttctcgtctggccctttatatggaaagtttgcttatcattttctaccttagtctgtctttacaaaatgcaaaacgtgtattttagctatttttttgaggatatttaaaatagagaaaagtgatcaaaattcattcctgtttgaattatggctgaaagtgaagagtcaaatgtgtggcattttttttcacactgagctatgtgaaagagctaatcaggaaaaaacaatctattgcactttcactttaagatattttatatgggtagatatttagttacattttgatttaaatgaatccaatgctttaaagtttttacttatgtaaaataatttagggaaagttgctaacagtaataatcgttctataagagtaatagaccaactagaacatatggagcataggctttcttaatcaaactctccaggaattgcatagatggatggatggatggatggatggattttatttttttcattgtacacttttatataattaaactttgatttttttaattcagaaatttcaatttacacacctgtttttagaaggatttccatcatgccaaagtgcaatataattgtgcacttgtgtaaacttttcccaagaaatttagagacttcaaatgtaaggactatttttttttttttggctttttaattcaaagctacatgctgttatggaataaaaaagcccagtatggctagccttttaacttctagttaaaagccagatctacttttgtttgaagttgtatggctttgttacaaatagatggcattaagaagatgctctccactttgttgtgactcatctttatattttaagaagtttggatttgttcaatttccccttgtttgtttgtttcttgattgcagtgcaagttctagttgagagcctgtgaagcttccacaatttcgtaggaggggaagatgtggaagaggatgcttgagacagggatgtacaaatataaataaaagaaaatcttagggtattggcaattcctctgctcatcgtttatcctaccgtaacaaagagtgcattttggaagctttctggggggataatttcagagggaagcatcaaaatatcatgacttctggacttaggatagaatccattgcaatttaatgatagattaaaatccatttgcattttctgcacttacattaaactgagggccagaagaggcgcttggggcttttaaacaactgctgctctccatagtatcgttttatatgatgtttcccaacctgtatagtactttcatagattcactttgtctcttctgagagaatattttaccattcttatgaatggaaaatgggccagtttttcatcatactatttctacatttttgttttataagaaatgaatgcatttcaataaggtttatgtgtcactaagagtgtgagaaactgtttggaagtatctgtgaacagaggcctgcacatagtaagtggtcaatatatgcttactgtttccgtgtatgaatgaaggggccgagcagccattcagagtccattctggctccctgggaatacttaattttagaaaccacacccgtgatggtaaatacagcagtgaaactagaatcaaataaaaaagaagtggaaaaaacaaacaatattcctgatgctaatttgatggggagttgttttagagggagtggaggagagacaaataaaaactttggagatttttatatggttaaggaaggctttccaagaaatagcaataaaaaaaagaatatactactgtcacatgcagcatggatgaatatgagaaacttaaaagccagacacaaaatagttcataccatttatatgaagtttaacagaaggcagaactcaatctgtggtgacggatgtcctcagtagcccaggtgggagggtcattattgactgggaaggggcgcaagagaaaaatctgggtgatagaaatgccctgtattttaatctggatggtgtataaatatctataagaattcatcaacttctctactttctatacttaagatttgtgaactttattgctcgataaaaatttaaatcataataatattgaaaataggtcatggaggggacacttgatttaacatgaatgcctaatagagtccttggaagaaaatcctagcaaacccctggtctaaaactctgctgagcttagcataggagacttttctgaataaggacatttcctattcatttttgttgcaaaacatttcaaaccccaaaggatgcttagcatgcagtaaaatcacatctgttgagccactgcaaggtgaaggctgctgaacatagttctgttgattctttgaggacttactactcaaaaacaatttcttttttctttccagattggcagattgctactctggctttactcctgggcggcgctgccatcattctcattgcattcctggtgggtttgatttctatctgcgtgggatctcgaaggcgtttctatagacctgttgcggtcatgctttttgcagcaggtaaacagattcattactttcaaatgagtattaaagtttcatgaacctttctaccatcttcctttcctatgcagaagaggtatgtgtttgctgcattacgtaaaaattgagaggcatttactatatttttaaggtaacttggctaaaggtttatcagattatcagttttcagtgtgttaagcatttcacagagcacaatggcagcttctaaacctctgactaaagcatgaacaaataatactgcctgacagggctattaccttaggaattgcagcaggtgtatttactaacagtcttttacatccagttttttccccttttttactgctcccctggtgatcttaaggcagcattattttttctgataaggaactgaaaacaaattccaaaatgtttacccttaaagatgtatatctctttgaaaatgtgtgatgtatgactccaaccattagacaagtcaattatatgaagtcaattgtatgttaattaatttatcaaccatcattgtatgaagcacagcttggattaaaatatcaaccaatgaaatgaaaagacgggactgtttagaaaaggggcttgcagactaaaagcccaatacatgatttgatgtgagctttaattttcatttataaaaatacctttgaatatattgttctttttgactcaaactgcaatattctgtggtgccttcagtttgccctgtcagtcatatctgatttgaagactgcaaagtaagcttctgtgactatcaataatgaagacactgacaaaaccatctaggctgttagatggatttttaaaagctgtttcaagattggaatagatgaaatttctcaggatttaaagggtagttggagctaaaaatacaaaacagaagtgttctgctgccccctactgtttgtgttcattttcttatacccatgaaggctggtcagaattgggggtgtcataaaaatgaaggtccaaagggctgaaggaatccagaagtacatctaattcaaatctttaagtgacttgctcaagatcgcatagtagctactggcagacctgggcctgggaggcttctgaatcttaatctagtggttcattaaccactgacttcctcacttatttatgcaactatttcttagatgcctattacaggctaaacacagtattagacacctataaaactggccacagtatcaccacagatactcactaatagagtagaaagcacaatttcaaaaaatattttgaagtcttagtcccagttattcgggatgctgagatgggagaatcacttgagtctgggagcttgacgctgcagtgagccgacagcacaccattacactccagccttggcaacagagtaagactctatctcaaggaaaaaaaaataataaaagtacctttttctgccgagacatgtgcagtacataaaatcaaaacagacacattactactaccgcttggaaacatctctatccgagacttcacacttacttgatttagtaccgtgtgctatgcctggtactcatatacactcaataaatagtttttgaatgaatgatataaaaatgactaaggcatgtagctcataatctggtggggtaaaacaggcatgtaaacaaataagtaactgtaatgaagggttttttttaagcaatttctcttttggggtcttaggaagcagctagtttcacatgactacaaagctaagaccaaaagacctcaaaaaagtaataaatatcaaaaggatgttttttcatatatttatgtttttatttatttaataaatatgttgggcacttacactatacaagtagacagtcttggtgttataaaatatactctaagggtttttactgaaaactgataattaagtctcataaagatagccaaacagattataaagattttgtcttcttttttttttctctgaggtcttttatttagggcgggcttattaccttcttgaatagttgctagaatagctaagagctagccattgctgtagcccatctaaaacactgtccttttttccacaactctctttctcaccagtcctataaatctagacttcagaattagatatttttataataataatgctgataagaatgattaattaagcacctgtcatgtgccacgtgctagacacttaacatacactgtctctgatataacaatctcaaagttagatatttattttctccgtattatcaatgaagaaacaggttcagaaaaattaagtaatttcccaaggtcattttaactagtaagttgtacatctagggtttaaattcaggatacctatctgacttgaaagcccgaatgaggattccccagttatctttacttcagtacatatcacatattggaaaaatcagtgcagaatcagccttgattttgaattcagttgccaactgtgcactgcagttggagtccgtcctgtaactccagttactccgtttctcgggagcaacacctgaaggcatttagtaccttgagatgtcataaagaccacaaactgattgatgcagcatgactgcaccatagcacataatgaaagttgtgcacatttccagtacagttgactacagcatatttctttttgtgtaactgacagtgataggtaatatatgatgtgattctgataactggcatccagttctcactaaagacttggtgaaattagagggactgcctcttgccacgttctcttcttttattgtctacttttgaactatccgcaggtcatttgtatgtcccacaggaatataggatgagtgttttctttctttccaaggcctttaatacaaattgcagaaaattctcttttataattcgattttacatacagaatccccatttattatgttattaaggatgattctttatgttatatctgcagaaagcctcctataaggattgtttttatagaaaggtgatgttttttcagggtcctgcagctgatttccatctctgagctatctctgattggaggcttgtgtcttacagccctcatcaccatcctataagtcacagtgagatagctggaaccatttcaagtctagattttggtagaaaaatcagtgtccagtttagatttcaaactaaaagagagttcttctattcaggatatttagattacatgttaatttccctgtaccgttatcaaactacacttcggctagaacaatttacagtatcacttcccaataattaatttcatactgctgccactagtagttacaaattaaattttaaaaagaaaagaaatggataccttcatattaaccttccactggcaaatgctttttattctccaaatcattgtttcttttatgtcaattttatatttagggaccaacctggctggtagggcctatcaacctttgcctttaaattatctcctaattttgtacctttttttcgtacaccatcattattgccttagtcgaggccacaacttttccctaaatggaacgtctcattccccaaatttggtcttcccctactttattttgtttttctatggcaatatctgactgttttaagatgtttatgtgactcctttattttgccttgttgagtatctagtttttcagttctttcttttagtctttctttagattccctgacttttctttcccactgatgacaccttagtcatcactgcctacaggtccccacacactgaatgaccttctaggggcctgtccttctctaatctcttccccatgtaatctgtcttggatacaacacatgaggtctccttgtgacataaacatctggtcttgtcacttgtccctttgatttcttcagaagcaaaccctgagacgagaaatcaagtgcatatactttatttgtaaggtagaagaagggatatgataaagagtatggaaaatgagacgggaatgggaaagcagccattaaaaggttacattatcaagccagttgtcactcgaagcagctggagcttaatcttcttggggaaactttaaaaaccggtgtagaacacgcacctcgagaataatctcattcagaggactacggagctggagtattaatgcaccaaatttggagcgtcattggttgagaaatgtcggttataatcaagggagagcagtgttaattttctggacctggcctgccccataggcagctgaagaggctttagtggccagaggtaactcaggcaaagaaatacaggtgctggcaattggaagtcagggtagcatgtactgaagtggggaagataaaaatatatggataggacaccaaccgcatatacaattacaataacctcgcagatggtctccctagagaaacaaaagtttattactttatgaaacactatggtattatagtatgaactaaacagccttgtgcatgcgcccttcattttacccatgcaaattgcttctagtcatactctcttaatagctgtaagcactatagaatatgctttgtcttcctagacgtcttttctttcctctgcctcttctgaccacctttcatccatcctttaagaaccaattcaaatgatgtccctctgaagccctcctttctttctctaagctgaatcagtacttggcacaatgtttgagctcagtaaatgtgtgttgaacatattataaacaaacatgcatgcctctactattgctgttgaatgcattgatttataattacttgtgtgcctgtctccaccatcagagtatgaatcatcaaagggcgagggccatgtcttatctatcttatccccttcatctagcacgtaggcacccaatatatgtttatcaaaatagtgaaatgtccttcttagaagaaaatattgaatatttcaatatcaatgctttgaatattttagtgttgaaaacactgaaaaatatccctttaaaactagaataaaacacaagaattagtaggtctacattcccgtcatgcctctgatccacacaatttcatggttagtagtttcattgcctgttttcaaaaaagtgcagggggcataaaatgaaccccaaatctcttaagattctaaaatgttccagagctgtacctatgttatctttgaggaagagcatagagaataccatatccaatgcctattttgtttcattgattggtagtaaaatagaaatatagtataatggcattttcctgacttctgaactctttatgttttttttttcttccctctacagcatctatgaaaggcaaggaggcatttttacctacatctgtgaattttattacatggagaaaattatttacaaatgcagaattatatttttctcagttttgctattacattcatttttctctgtgattccaaagggagtcgaataattcagaggcatgaagtgttttacagtaatttttattgagctccaacacaataaaagtctaagaaagttgttcgggagagtatgccagtagggcctaatggagttgtatttccatttttccactagagggaaattatatcattatattataccatggaggccaaatatttgctaaataaaacacgttgaaatgaatattaaaagcagcgtaggtaaacacctcactccagggactagtcagttcacaaaagaagcagtgtaatcattttagagtaattcagattagttattacttctctgctcaaactcttctaccagctgcctgtcacacgtagaataaaatctagaccccagatatggttcacaggctgtccatgaaccacgaagggcccctgctgtttcttccatcatatctcatgcttctcccttcctgctctctgtactgcaatcacagccttctgacttctgttccagtgcaccagatatgctcctgtgatgggagttttgcagtgcctatgcctttcacgtgggaatgctcagtccccactatgttgttctgcacccccaattcattcagatctgtgctcaatatctcctcctcagagcagccttctctcacgattgatctaaaagagcagccctcatccctgtgttctgtctgctttcttgcatttcttgtctcttagcaatatgtgacattatattctatatttgtttactaatggactgactacccatgagagtagcagctttgtctcttttgatagcataatgccttaaactgtatcgctttagaaacattcagatatttattgaatggatgcatttattgaatgagtaaatgaattactatacctaacccacattcttgtttcagtcatatcctggtaggatcagtacagatttgacgagtgaacagagtatagaaacctaaggagaagtgccttttttttttcaaatgtacttggcaactttggaattttcttctctgtagttatggttgatagtaattgacttcttgttagttttaagacatttaaaacatgaaagctcccttttcctcacaaaggcaaagagccaactgggctttttttaaaattaatgcacattttagcacttactaactggaaatagatgaagtgtgggtcatacaatatgccgtcagctgagtcctaacaacaaccaaaaccttttctgagaaggtctgatttctattttggatatcagtagggtatcctcttatacaaacttacttgtgtatccactctcagtagtaatggtaggcaaagtgctgactcagcagtgttgtgctacacggcagaaatgttgggtgtttttatatctagttctaggtcggtcctttgacacctagccagagccttatagaaagaaattttgaggaatcatttcctcatgaatttgctgtatttcatcagttttatgggagagaaagatgactgttatgtagactttctaggaatcttcatcatactggtaataatcttttacatgggctaaaaatagatgagagtacattttaaaacataaaattccattttaattaaacactctatccatcctagtgttcttttttaaaacatataagcgatatcaaaactatttatgtatatagttttactatgtcagtttgttccctccttttctttaattattcacatttttgttcttttcagatgaattaaacaaaaattattttaccccctaaaattatttcatatatcagaggttagcaaactttttttgttaagggcaagaaagtaaatacttttggctttgtgagctgtgtggtttcttttgcagcttctcaactctgccattgttgcatagaaaatacgtaaatgaatgagtgtggctgtgttccagtaaaactttttcaaaaacaaaaagcagaccagatttggtagtttgccaacccctgttaaatataactgtactctgtattttttagggaaaaagattgtctatttcttgagggtggaagctgtcctatggtagagaatgaagctgtagttaactaattgtagttaaactaattaaaataaaattacataataattgatctaataggaagttaagaattttaagtggaagacattatgtcttgtgcatatccacaacataaatttcattttattttagatagtagaaacaacacaaaacaaaacaaaaacaaaataaacattcccttcctgattattttggtttattttattcggtatgactaatcatatttcccctttggccctgacagaagtaggatctaaccagggactaagagctaagttttgacctctgttacagtagccataattggcctaggttttcctgtaccattatctctcttgcctttatcgacttaattcttttttgaaagtaggtggaaaacagatatgaaaatatcatctgttaataacttttaagccactttttaaagacaagaggcatagagtggatgagaagaaaataatgaaagtagctttggatcagagtaatgtaagcaaagacatcatggtgagactttctggcatattgggctgagttagtattgcaaagcagcaacaacatcaaaagcacattatcactcacaggatgaccagttgcatcagtagaaattaatttgaatttcctaattccttaatagcataaataaataacaagagtttcagttggcattggggtcactattcttttttttttttttttttttttttttttttttgagacagagtctggctctgtcgcccaggctggagtgcagtggcatgatctcagctcactgcaacctccccctccctggttcaagcgattttccagccttagcctcctgagtagctgggattacaggtgcacaccaccacactgggctaatttttgtatttttagtagatacggggtttcaccatgttggtcagactggtctcgaactcctgacctcatgatccacctgcctgggcctcccaaagtgctggatttacaggcgtgagccaccgcacctggctggggtcactattcttgaggagctacttatacggtttattagtggcacaatttagtttaactagtactacttgccataataataatgataattatatttttaaggtgaaaatcactactttgtatgctcatataaattattatattgcactaattattttatctatactaataatgatttactaattaataggataattcttatatattgggaaaaggtatttaaacaaaaaaattattagtattttaaagtataccatctagaacaagccatctttaaaatttttggcttttatgtatatttgattacaaagttactctcatacatatatagttacatatttatattattttatttgctgcaaataacattttctaattttgatttgcttttctttcagttgttttacaggtttgcagcctggtcctttacccaatcaagttcattgaaactgtgagcttgaaaatttaccatgagttcaactggggttatggcctggcctggggtgcaactatattttcgtttgggggtgccatcctttattgcctgaaccctaagaactatgaagactactactagaaccaatagtctcaaagtaaaaacaaccaccaccatccaacaaaaggattacgtctgcatcttttctaacttactattttctaaaacacttgtggagcatcaagcagtttgctcagttgatttaatcttttttgccttttggctgtcaacatcataaccagcttttacatccattttagaaatctgcacaaattaagagagctgattagacataggcaaatgctgcaaacttccaatatgttcatatcgtttttcttgacaaatgaagggtctatatgacagcaaccattgtgagaaactagttggaatgagatttgcctcaatctcctattgcctgcaggggagcagttggcataagcaacatttagaagttcctttgcgctgacaaggattccactgttagagcccttaccgcctgcttatcctacccaatgactacattggctgttggttatttgcttgagtgagcccttgaaaaatgaactgcccttcagcatctaatgggagttgtgaatgtaactggttaatgatacacattccaccttcaggaacactctttttaatgggaggttatgctttggcaatcagcgtctccctgggaagagagtcaagacttggagacatgtgcttctcattatgtggttagaaattggtgcctcagccctatctagactggggaaaaattgaggatctctgtttttcctggggcaaacagaaagaaatctgcatgagttgcttttgtaccctttaaatcatttgccaaacattgcagcaaacaagtgtgcgtatgtaacaagcttcactgtttttatagaaggtgaaccattagtataaatggtaataagttgttccctaaccctccacatacatttgcctatcacacgtaaaattaatatttactctagtgaagtggtttgagcactaaccttgtacacattgttaagaggcttagattggtattcatacttatttaccatacaaaagtatggtaccttaaagcttttgctctatgttctttactgtttcactggaaagtgtcaatagagttgcctaagaataaaaattgaaatggtgttaatctgaaaattaatgattctctgtaagcactgtagttgaaaagagagtagcaattaggatgatcattttgtgtaaaattcattaaaatagaaggctgctattttttgcaagtattttaaatgtcttcatttttttaagaaaggaatagcgatagatttatataaatatctaaatgtctcagtagaggagtagaattcatctggttatcacctggtcctctgaagttaactgatgggctaaccgatttgtgcacacacttaggatggatttatgttaagggaattacttactgactgttcaatggaaggaagtattaataatagggaataagtttgcaactaatctcatgctgcaaacttgtgttaattctgtttaatatacaaatttggatagcttaattataaacatatttttatatcaaatatacagttctaatataaaagttataaataattatttttgttaacaaagacactaaaacagtatgttctggttttggccctcttgcagaaagaagcattagaaaaattactttaaaagtagctatatgttactgtattgcaaaatctgttaagagcaggaccacatcgatagtatttaataatttgttttacctcccaaaacacagttcttctttcagcttgtcttaagaatggttgccaaaaacaacagccaaaaaaaaaaaacctattttattatccaaatgctagaaaacacacatgaattttctataaaatcacgaatatgaagtaccaggtttagtcttactttagcaatgatagacaaaagcgaataaatacatcacagacagaaacctttataaaaatatatgattctataaagaatcattagaaattatgagtggaaattctccagaaagatagtattatagagtcttttgaagcaattttttgagaaatagtaaaatctggggcagagtgtcttgcagttaattgcatattgtcagagcagcatgagaaatatgatatttggatagggatttcagcaactaaacattctctgttctgagatctctttattcctgaataatgaaagaatagtactttggtgctgacaccaatgaggcacttctcttggtcctagtagaggatgcagtgtactgttaaaccaatatcatcacatctcgagtcttatcaagttttcattctctgtcaatatgacaagctcaaagtgacagaatatgttataggttgaagcacacatatttgcagtttactgaaaagtagatttcttatgtgacttttttcccttctcagcaaagagccctacactagatttctaccatcactaatatttggaagtatttcattactaacaatctcagtacaacatgaaaattgttgcttctcatctaaaatacaattttgtctatcagaataaacacaagtgaaattttcacctacattaacattatgtctttgcagctttaggtttgttagatgtgttcttaagcataatttttagccacaaacccattgttagatagatatctatggatatagatctacatctatagatatagatatacacacatatatatactcacacacatatagcataaaatactcagcagggctagttattccgatttcttgcacaattatttagctttttgtaagttcaacatgtaaattttaaagacataaatatagagagacttatgtgtttgaatataaatgatatatatggattagcatgtacctgtatattattaaacatgcaatgaactgactggtaagtgacgtctaattgtatggctagcaatgtaatttattcagactgtatttttgtacagagcagtgcactctaacctatgcctctgtgtcctctttaatgcctaaagctgtgcctagaaatttcatctgtcttaaaagtaaaatatacttcatgctgtttatgctattagtttctgtactgctattctatatttattatttttaaatatatgacatgtttactacttaaacatgaattcatggtatcctggttattttttttaagtcatctgggggaaaacctgtttatcactccagtgattttgagtttgcagtttcacaatcagttcttcatttcatgatttttgtagttgacatgaagtcatctatgtggaaaaaaataaaaataaaagtgatttcacggatgtggtttgaa

SEQ ID NO: 99 - DNA, 23421 bp, Homo sapiens
ggggaaaagagctaggaaagagctgcaaagcagtgtgggctttttcccttttttgctccttttcattacccctcctccgttttcacccttctccggacttcgcgtagaacctgcgaatttcgaagaggaggtggcaaagtgggagaaaagaggtgttagggtttggggtttttttgtttttgtttttgttttttaatttcttgatttcaacattttctcccaccctctcggctgcagccaacgcctcttacctgttctgcggcgccgcgcaccgctggcagctgagggttagaaagcggggtgtattttagattttaagcaaaaattttaaagataaatccatttttctctcccacccccaacgccatctccactgcatccgatctcattatttcggtggttgcttgggggtgaacaattttgtggctttttttcccctataattctgacccgctcaggcttgagggtttctccggcctccgctcactgcgtgcacctggcgctgccctgcttcccccaacctgttgcaaggctttaattcttgcaactgggacctgctcgcaggcaccccagccctccacctctctctacatttttgcaagtgtctgggggagggcacctgctctacctgccagaaattttaaaacaaaaacaaaaacaaaaaaatctccgggggccctcttggcccctttatccctgcactctcgctctcctgccccaccccgaggtaaagggggcgactaagagaagatggtgttgctcaccgcggtcctcctgctgctggccgcctatgcggggccggcccagagcctgggctccttcgtgcactgcgagccctgcgacgagaaagccctctccatgtgcccccccagccccctgggctgcgagctggtcaaggagccgggctgcggctgctgcatgacctgcgccctggccgaggggcagtcgtgcggcgtctacaccgagcgctgcgcccaggggctgcgctgcctcccccggcaggacgaggagaagccgctgcacgccctgctgcacggccgcggggtttgcctcaacgaaaagagctaccgcgagcaagtcaagatcggtgagcgcgctcagtgtgccagtcagttacgcggcgcacgggcgggggacacgagaccggctgggcccgcgcgctttgcgcagcaagtggcttcgagctggggtgcagctcgggagtagtcggggagggtccttgcaccccggaattggagccctggaggatcctgctacccgggggaactgtctagccgagtctatcccagctttcgctctttctccttcctcctacccacacgttgcccgccccctccccctactctgtccgaatactgattctgagctcttattcggtcacaaggtccaaatcccctggtaccctatctacagtctgaaagagtgtatgttacattatcaactccctcctccacccccctcgcgccccgcataggtttttttctgaacttggaaaaaaaatctcttttgttaaaatattattttaattgcggcctggagagagaggcattacctatcttctgagctaattccacctttgtccctcttggcccctccacccccgtgcctccagacgtttctatccctccacccctacacacacaccacaaacaccccacatccttggtagctaatgcctttcgggtgggagccctgaagcccctcccatgtgcataaccattgctttttattgaagatgattgcctgtggtagatggtaaaacatatttaactgcaaaatgacttttattttatcccaggaagggaaaaaaatactttaggagtgcgggggtgcggggtgggggtggggaagagtagaaaggaagggtttggtattctgtgcctggtgttcgtttctgaatctaattccttttccccctctccaattcagattttacctaggatgaaaggtggacatagggctgggaggcaaaaggggatgtgagattcagagctttcaacttcctcgcctatgcagattcctggcaccaccaccacctccacccccgccccgcaattcctccctccgcaatccccccaccccgccctccccaatctcttaaaccagatcacaagtgggtgtggattaagtgcatgaggggccctggaaacgcagaatgcaaaattcagggggcggagacagaaaagccacgcactgggagcctcgcctccgcttgccccgcccccgggttgcgccgcccccaaattctcggcgccaggagtctagggttgaaatgattgacacagctacttgttcaatcagaacagttctacccccttagactgagtttctttttggaaagagttacctgatctttagttaaaaaaaaaaaaagttaaataaactacataaaagtctgggttctaagacgtcaaactggctattgattctctccaaaaggggttaaaacttggctaaacaatgtttatttggcgtagtttagttacggagacagtttagttacgggggcaatccccttctccctccctgtccctttccgttactcacgagcaccctaacatgagttttctgaagtgcaaatttcagtcactatagtgcaggagaggagtgcgtccgcgcttgccaggaggccggagagcttcctgtgttcagcctcagtccccgcaaaccctgcagggtttgagtggcgcaggggccagcccctctagctttgcaagaggtagtcgatctccaaacctgcaaaaagtcgatctttttgcaggttgcagcctgcaaaaagaggaaaaggggaggatgtgcaggctctgggaaccccagagaccggcttgtgagattatttttattaagatccacttttcaaaggcggtcctgcccgccttcatcttgggggatgtggatttggaaaagcctagcggagaaggaaaacattaattgatttcccggcttgggagccaccgccctgggtaacaatccagtcacaccgaaagaacgtaaggtgtcactcagccgcatcctggctccacttattatttaccaagcgtgtagtgtgatgtggctagtgtgaagggtgtacacgcagagcgcacgcgcgcgcaattgctaggcgagcacggagggcgcatcacacacacacacacacacacacacacacacacacacacacgacacttcagtcccaagcaagatcccctgtagaattccctgccgccccttgctcaacccccaccttctgagtgcctttgggccaacccgaagccgcctcttctacccgccccctccccagcactcctctccgactccaccccgccgaaggcaggtgcccggccggctgctgttgcgggttggcggcgctccaccgctgctggtgccgacatcttcttcccgaacagatgggatgggagtgggcgctcctggaaagggcgttttagccggacaaccactgggcgggtccccaaaaagttggagatggtgtagagaccgttcttaaggagagagaaatggacagagagagggagagtgcccttttggtcctttagccaaaattcctgcttcccaacacacctcctacctccctcctctcccccacccccgccaaaatctgagcttgcagatatggatttgccccctccctcccgcagttgcagcatacacacacacacacacacacacacacacacacacacacacacgacatattatatctatataattatatattgtatatatggtatatactatattatatatatttatatgtaaccaaacatgtagaacccaaaaaaggtgcatttctggaatcagaaatggggagcagaagagagtgaggtggcaggcagccaaagcctctgggagggaaaggagagggcggaggagagggtgttttgctaggctgttgctgagcaactggagagggagtgggcccgagagcagggtgctgagagcgagcctggctctgcatttcattctggccagttcaggagcagagatagatacggaaaaaagaatgtgtgtgaggctggagggagatgaaagacgggagttatttgatgggcaaagctcagtaaatagcggtgagtggagggagtcaaggaagtactgggtttgctttcgggcatttttggtggggaatgaggtttgatgggctggtccccagcatagataccggggttcgggtaggtctcctctgtgctggtgagacattcagtttaagatgtagggagccgtgggttctggctttcggttctgtcattaagaaatgagacaccgtgggacaaaaaataggcttctggaaaagaaagcaaaagcattacctaaataaaagtgaattcagcctttgcttctttgaggggtttggcctccatcaccctggcttcaactccaagcctggtctaaaatgccatgttgaagtcgagttccagagttaggtttattggccaaatttatgtctgggttgagcaagatcatggaaaactgaaggagccaaattcctttcccacccgcaccccctccctctgaaacaagtctttgagaggatggcgtgccctgagccaaccaaaacgggagttgggaaaacgagatggggctttaactggacttttctcgccacctccgcccaccgcccccgcccccgcccaccccgccccccctcccccacctttctgctgtgtcagctcagactggaagaacaagcagagttagccctagtgagagctcatattctttccatttctctttttcccctttctcacccctccctcctactcttccctccgaccttctccatccaccccccgaccccccaccccaactctaaggcatcccctgagggcttgagttttaagtcagagcagctgtgagttagtcccggggcttgggctggatttgagcaggcaggtgggcctgcagctgcagagggtggaccagcctgaccctaggagccagaggtcatcgtgagggttacagcaaagggcatgggagcaggaattccctgcagaagccctggcccccttaatggagcgaagaagccagcgggaagggaaggtaatacttgtctaaagtttctactttgtacctgagcaatgcctatgaaacttttaagatatttagtgtgtggaaaataaaactctggagaagagatcaccacactccagacccactacatccagaaactggaagaagatcataaagagcaggtaccaaccaggggccagagcagaagggaagagggtgggagaatggctgcgttgagtcaagcaggcgatttggaggggtttgtttagttttacatttgctttttctctacagttggtccaaaagctgcaattcccagagactatccttaaattgcaatcaggacatgttattcaaaacagtaagactgattacacattgattacatacttgcaaaaataaataataaaataaacaaggatggcagtgtaggcttctactcccctcccccaataccagtgaaatcccccccttttatttccagtttcatttctttccataaattctgttatgatgtcatttctctctctctctctctttttaaaaaatataaatccagaggagtgactgaaaatctctgtgaggaggagaggttatattcccaccttggccactatgctgttggtttagagcacctaaccaggttagttagttagtgcctggccactcagcttagctcagtcctagtgtctctccaggaattgtctgggtattggccaaataatgttaaagctggaaggaacccatagccatcatcacagtcaaggtcctagttttagaatgaggatactgaggccctgagtgggaagtcacttgcccaagatgtggcagcagggttagagacagacaaggggctgggactcagctctttcccgcaggggctccagcactgcattcagccattcctggctttctcgctagtcactggggctcatgcctggacctgggctaacctgcagtaaggcctttggcaaacactgccagatgctatcactccatgacataagaacccataatctgaaggcactctgttttaggggcagtaggaaaaggagtgaagcggccccaaagtggagagggccacactctcttattttcacactcacttctgtccctttttctacacagtcttgcatacaagcctggcttaggctagtggtttggtcagagaaagaggaccaagagggtgtgaaggaggggtgttcaccccagctttcaggtccatgcgccaaacctcattttctacatgacaggaagctctcctgatgtggagaggcaggcaggcctggctgcctctgagctgtgcagcggcctgtagtcttgaagaacatggtgcagaagtggcccgcttccaacagcacagtcctcacgtggtgccaacagaaagcagagatcgagagagggtgtggttggatggggtgagtgcagtaactaggaagttctgcatccgaaggagagaaggaaaaccatataccaccaaagctgataaggaagagagcatgagggccccctggctttctttcataggcagatgtgtctcagatctttcagcaggagaggagagatgtgcttccagagggcagctggggacttctggttgtgctgcaggaagtgctgagacccattctaatacatcctggaggccgtggcagctcctccttctgggatgcttaggaaggaggcagataagataggcccctttttccggtaagtcagacctgccaggtgaactataggaacattttaaacgaactcagttatctcatgtttgatccctcaacctaaaccatcaggcccctttccctggcctaaaataaggtcccactgaatctgcactcagagccaggcctcagatgacctctgctgattctctgagttgtttaatgtgggttccagttatcccgaactgggactgcgacacccctctgtcacctcagccaggatgactcttcttccagatcatttagaacagcacttccaattgaaacataatacaagccatatttgtcatttttaattttctggtagccacatcttttttaaaaaggtaaaaaaaacagggaaattaattgtaataatacattttaactgaatatatccaaaatatcctttcaccacacgctcaaaataaaacaattataatgagatattttacattctttccttcatatttagcctttgaaatccggtgttttttacacttacagctcatctcaattcagacactaaattttcattggaaatacttgatctgtatttagatttcataaaatttacagttgaaaaagcagagtcacatacctgaggcattccaaacatactttaaaatctttccaataactgagttgagtatctgtttttaaatttaaactaattaaaattaaataaatattaaataaattttaaaatgtggttcctcagttccccgggccacatttcagatgttccgtatgtatctgcacatggttaatggctaccagcaaacccctctctcacctgagaaggcaactgctgtccccactctttccttttgctcccaaagactcaaaaaaggggagtctcagctttcgttgacagacagggctcccttgtttggtccctagcagagcctgggcaccttcttcggggcctcaggagagaagcgtaaaccctacttcctccctgccgcccccttctggtcatgcagaactttggggggatgtggctgtggctggcaatgttctgaactggctgtgatgggtcatgatgggaaagtggccaggagaaaagctgcccagtgcttcctccagaggctgctccccacctatccccccaccattaccttctcatttggggaatgtatgaggaacagacagacacttctactaagcatgctcccccttccccaactccaaaagaagcttggctggagattctcagccagggacttgtgcatcagtgtgtatttcctatgtgtacagttatcgccagctgcttcccagggaccaagaaatgtgaaccagagtcacaaccccaaatcctagtttggcatcagaaaacaacaaggagcctctctttacctctggtccctggacagtggggcagatgtaagggggacctcagccccttactctgtgaggtgtcaccttcccacctgtggcatctacactgtggagggcggtgggcccccttttctctatatatcttcagggaaggaggctaagtgcccttaacgcagcatgaaggaatggggttaggcagaggaaggactcccagggggagctctctaagtggagacgggtccggagagcacctgtgccaagtcctcacctggtgttggccaacagacccccagagacaaaggtcgagccaacactttctggcagaccttcctgcagtccaaggagcctcagatcttgtggtctacaagtaggcgtctgtcaaccaggtgtcacagcaaccaaatttttagttgatgattcgaactagggaggtggtaggaaacagcactacaaaggcagagacctgttctgagagtgaattagcatgcatcaccctgattaatcctcagaatataatggagaaggggccattgccatcctccccataacacaggtgagaaaactgaattggaaagaggaagaagaaagtaaggtctttgggaggctgaggtgggtggatcacgagctcaagagatcaagaccatcctgggcgtggtgctgcatgcctttagtcccagctactcaagaggctgaggcaggagaatcatttgaacctgggaggagagggttgcagtgagccaagatcatgccactgcactccagcctggcgacagagtgagactccgtctcaaaaaaaaaaaaaaaaaaagaaaggtcaaagtaaatctgtaccaaggtttgtttatttatttatttttagaaacaaggtctcactctgtcacccaggctggagtgcagtggcacaatcatggctcactgcagcctccaactcctgggttcaagccatcctcccttctcagactccccattgctaggactataggtgcacactgccacgcccggctaatatttcattttatgtagagatggggtcttgctgtgttgccaaagctgcatcaaggtttactgagctattgtcaacagcttcatcttcctcccagaaaggacagctgaaggtttagggtggcacagtttgctgtacctattcagtagtggagctgggatttgaacccaggtggtctggttcctgattctgaatggttatccactatactacatggtgtctgtatttctctggtaaggatagagatatattcccagcttggccagctttgctgttggtttagagtacctaaccatgctatttctcccggcctaaaatggggtaggggggctcagctgggtacacctatagccctcatcatccagtcagtagttctctaagtctgctcaactcccctccggggtcttcctcctggctttcctccattcttacagctgctttttaggatgacagctttgggttttttttttttcttaaaaggttagtgctcatttcctcctcagcccataattcaggttaaaaagaacccggaacatgcatgcctatttctgacgatcaagtaaaaacaaaaacaaacaaacaaaaaacaaaaacaaaaaaaaatgtcttctgagagagactggcgccaggcagctgctggtcagagatgggatgggtaggaaaagaaatgatgttgccacttccctggaagtgtccacagcaccttccccctgccacaaccactgtggcctttctccttctgcaaatgcacacacacaagcgcagaaaagccatttgacatccacagctgggaaacagacttcaagagactgagacatgtcttacattttttcaaacagtgaacagccaatccctcatgcttccaccagccttgtgttgtagggaggggctggtggctgcaagttggctagggacctagggttggcaagggaggagggggactgcagaacattctagactgggcctcagtattttcatccatacccaggcacaagtcagtgccgtcaggccagcactgaccaggactttctgcaatgatggaagcgttgcaggtctgcaatgtccatatgtggccacgaagtccttgaaatatggctagagtgactgaggagctgaatttttcattttatttaatatttatttaaatagccacattggctagtggctaccatattaaatatatacttttttttttttttttgtcacactattgcccaggggggaatgtagtggcacgatcttggctcactgcaacctccgcctcccaggttcaagtgattctcctgcctcagcttcccgagcagctgggattacaggcacacaccaccatgcctggctgattttttatttttagtagagacagggttttaccatgttggccaggctggtctcgaactcctgaccttgtgatccaacctccttggcctcccaaagtgctgggattacaggcgtgagccaccatgcctggcctaagtagtacattaatatatagtagccttaggccaaagagaagcccagtgaatccaggagcacccctgctgtttctcacacccatgacgctcatctgtctgcttccctgtgccctgcggcagggttatcttgctccagggcaggagcatggatgagataacctcccaaggcatgcactgggctctaagccccagcttatattacagaaatacttccagacctacttctctttgcctcttgggcagatttacacatctctccatttaaaggttatttattgaatactatatgctggtgagacaaagagaaatgacaaagctctgcccgtaagaagttggctgtttaaattccacaggggggactagaatgaaacccagaacaaattcagctccctttttcattctttgtagagagattctaggcgtcctcatcttatcttctgtctagaaaaggagatgggagaatctccccaggtctgggtggcctggcaaagcccgacactcttcctggactgtgaatttcaaggatgcctctgtttcttcgatttttgtaagctaaggcacaatatctgggtcacctagttttctcttacaattgattattaggtcaagtgagatagagtgataaactaacaccagcccaggaacaggctgttaatagcaccggggtgtggctaagaggtccgggggcggggggtttagattttaggcaggcaggtctcctggatccatccattgctgtgaccagcaagcaaggtggagtcagaacccttcagactctactggaagagaacagccgtggcaaaagggcaggtttggagaaagtggttgagcttgggcagggtacatgcgttgtgcaattgtgcagcatggagtatttctcaccctaagatgcctctgggtctgtagcagctgggcttgcatcatgacactctctgtgtttgccaggacatagaggatggtgcaatcctcaaacacgtgttcatgttaccatggggagaggctgatgtactgtgtgtgcctctgtggatgctgctgcactggggtgtatggggaactccttatgaatgaaagaggactgagttggccacccaaatgtggcaggggccagaggcattggagagccagtgggaaggactggaggtattatatagaagccagagatttagatcccaccccaaaggtaaatactgtatccagataatattatcatcatcccctcccttagtcattgaatagggttatgaaggtaaggtctggcctccatagatcccagcaggagaaatggatgctgagcattccacatttcccatcctctgcaaaaacctctcagaacagcatctcatgggcggggaagtctggaatatgtctctcttccttcctggatcattttccagttggaggttacagaaacagcagaatgccatgcacaaacaagccctgttcccctctccctcacctgccttcactctcccacacatgggttctctccgggcctcgcttgtttgtctccctgactctttaaatatatcctgcagacacacaaacagaaggaagggatttatttgaatgattattgcagaagtaggagagggaggcacccaaattccagatttattttttctttgagacagggtctcactctgtcccccaggctagagtgcagtggagctatcaaagtggagcaatcatggctcacctcagcctcagcctcaacctccaatctccaacctcctacctccaacctcccaccttccgggctcaagcaatcctccggtctcagcctcctgagtttctcagactagaggcgcacgcctctatgcccagctaatttttgtgttttttttgtagagacggggtttcactatgttgtccaggctggtctcgaactcctgggctcaggcaatccactcaccttggcctcccaaagtgctgggattagagatatgagccaccgctctcaattccaaattccagattttaaaaacacttccaggccgggcttggtggctcacgcctgtaatcccagctctttgggaggccaaggcgggcggatcacgaggtcaggagatcgagaccatcctggctaacacggtgaaaccccatctctactaaaaatacaaaaaattagccgggcatggtggcgggcgcctgtagtcccagctactcgggaggatgaggcaggagaatggcgtaaacccaggaggcggagcttacagtgagccgagatcgcgccactgcactccagcctgggcgacagaaggagactctgtctcaaaaaaaaaaaacaaaaaacgcttccagtccctagaagtgtgcccatgctgtgtgggtgtcagtctcccacgccctctgctggccacatggagatattgacctgtttgtcaaacaggttccagagcagactgttgagttcttttgctgttcacgtgcagaacaatcttcaccaggaagtcctcccgggtatcctgcctagatcccttctgcaacctcagttcattttctcttgatgaaatagctccagagtagccagtctacttgttccttcttgttttatctaaaacgcaaagccttccacaattgaaagcctatttatgactcagccacagagcagctgagtcgggctggctgcttctggcactcagctccagtcttactttccagccctttaatctccatggctctgccctggctcccctccaagtttccgctgtctctctggagcctacaggtgaccacaagaccctgattagtatcttcgacactggactctgctgctgcctaaggaataggtcccatggggttaagtggcaccagaaaccaggaggcacatcaaaatgttaagcctgctcttcagaagcagccaaaaagcttgcaaagctggggaaggtgtgccctcaggagacttgccttggggaggctgggaaaaggagagagtttgcaaaagcattttgagttccttaaatgaagagagatacaagaatctacattttgtatgccagtatcatggttgcttggccccggggcagtacttgaacactttcaaagaaaagagtaagagaggtcaaaataaatttaccccaaggtttatcaaaccgttgtcaacagccccatccccctcccagaaagggtgactcaaggttaaggacagcccacagcacttcttagaaaaagtcccaaaaggtgaaaggtcttgagaagagctgttgagggaaggctgtgggccaccatgcttctgtgtcccccaaggccaaagagagaataagctaaaatgacagctggaaaagggcaccctctgaccaaatggacagagcctcccccaacaggtagccagaggaggatggaatggcacccccatttcagatgtccttaagaactagagagatagatgcttatttctgcttggacacagggggatggactaaatggcctacggaaaggattccaggaactgctacaccagccacaggagagaagccagcttcccaggctgtctccccttgaagaggtgacaatgtgttggctctccaggccaggctggggcagcccactgaaggagacgcatagacgcatgcgctggtcagcagccagcccactcccccacctgccctcactttatccagttacaatcttgattgaggaaggggtccaggcttctccaatctgaaccccctccaggctttcagtagccaccatatcctgtctgcccctccccctacagtagtcaactactttttgaggattaaaatgcgtggtgatgctgaggttgagtggcacggctccagtccctccataagacgtgcccaaaagcccttctgtgcaatggttagcactccctctccctactccctcttctccaagatctgagccttggcgtgaggcctgtgttactagataacggagccccagcctttcaatttgtacaaagtccccaaaccagccatgcttctcccttcctcctgccaatctcacttgcgctacaaccaagaaaagtcaatttaccccagaacatgacccttttaactaatccctagaatcctgcattccacctaccagagatgtcaccctattgatgagtcgtcacagcagggtctgatagagcagaatcgaggtactgggacatcaagacatgactgggaagagggggtgagagtccagaaggggtaccaggattctcaggttgaattttatttagggagagcccacccaccaccttgctatttgctttccccaagtcatcatcttcctctccagtaattacgtcccttcctttcctgtgaataaatacccaaagcaactcaccaccaggaacgctgcgaacctttggaggcttctttagggcagggaccttctctgccaaggccttaaagaccagatacctatttcattagacttgacaaatcctgagccaagagagaaacagatgcttgggtgcttcctgccacctgccatcctgcccaggttaggccaggtgtccaaatgcctttcctaactcacacctggaacttgcccagggctgcaagctcagaagtcaggttctatacctgcccagaggcataaaacagcgtcttctcaaaaaagcttctctttccttgcaccccacccccacttcctggaattctacccacttcttctgttccccatcccagatgtctggcggtcactgttcctggacatcccagtgatcatggagtagatggagaacagaattttctttcacctcatttcagttatttaaggtcactcaaagctctattttctctttccagtatttgaaaaaagagggaggcaatgaagacagggccccccacctccactcacccctgcatctggtcccactgtgaggcatcctggccacacgctgcccgcctggaaacaacaatctaaagttcccccattctggttcctctgaggctgggggaggtcaaggatctgagaggagaaggggacccagggatggatgcctatgagatcagaatttaggggaaaactgcgcaccaagaaaaggccggacgggtggaattaaggatcaacaaatacatcaacaaagtctgacttctctaaaggtcaaaagccagctaagtatagactgtcagcaagccactcctatatataactgtcccggtctcagccagctgtcggcctctctcagtccagagctgagtaacgtcccagcctcccaggcccccgagcaccgcgccagttctgagccagagcaggagcaaggcctccgacttccacttggccccacgccggtcccctccgggcctacatttctggctctcccctcccctcctcctgccgcttatgaaggtcctcaccaccctgctgctccagaccccaggaccccctcctcctaggttccccaggtccaaagagacctcaacatccagcagctctgaaagtgcaaagatctcactaacaggacagcctttgcccttctcgtccacgccctgactgtgtcatctgcctccatgggcccagattcccgggttcctacttctcagccccacctccagccatgtcccatctacttggccatcccccagcaagcaaaccgctcgctgccaccttcatccttgcagaggccattttccttgcccttcctccttactgcccccagaaggcctgctccgtcctcacccatcagtctgtcagtctctcgattctcctcctctgtgaagcctccctgcctgcactctctgcttgactccaagcatgccagaaacttcctgccacttaaatgagcattccctctgcttcctggttcttatccccctgctttcagggtgtgctccaggagggcagagacacatctgcttcagcctttattactcccctcaccccaaactgcccagccctgggctctggccgtgtgcaccttggcccacgggggctgaccctccggctccttctcctgcagagagagactcccgtgagcacgaggagcccaccacctctgagatggccgaggagacctactcccccaagatcttccggcccaaacacacccgcatctccgagctgaaggctgaagcagtgaagaaggaccgcagaaagaagctgacccagtccaagtttgtcgggggagccgagaacactgcccacccccggatcatctctgcacctgagatgagacaggagtctgagcaggtgcatctcggggattccctcattccctcccagcttttgaccttttcctgcatctaaatggacattcatggcggcaggaggtgctagactagacccagcagaggacctacagcccaccatgtggctcagcttaggacgtgggagtagagtttccagagcatacacttgtcagggccaagggcttgtgcaagtaagtgggaatagaggcggtgctcatttgaggagagtgtgtgccagcccagcggccacgtaccaggtacctgggccctgcagctgtgtccagtccaaggcagagactgaatattctcctagagcatctagaaatgggcacctctggacattgttactcagcagaagagaaaagctgcaggggagggggtggactggaacacaaaagagaaagtatgactccgtacctggccaaaggcaggctttgtatgatcccagcgcacgtgacaggtgacagggaggaaagatctttggtagcagatgattagaaccaaaggtggtgactttcctccagagacccttcagcccccaccccctgggccattcgtcagcgcagctgggtggttttcccttggtctcgccacgcctctcaccctcctgtccacacagggcccctgccgcagacacatggaggcttccctgcaggagctcaaagccagcccacgcatggtgccccgtgctgtgtacctgcccaattgtgaccgcaaaggattctacaagagaaagcaggtacgtcccctgccctgagctccaggctcagactgctccaaaaatggcacctgccaggaaactccaccttgggcaagtgcctaaggtttccaccgttaaccacttagtgtttcctgggcctcagatacccattcatataccacgatcatgactttccacattccctactatgctgtaatccatttcctcattctctcctatgcggtaatccactatgctttccacaggtcgccttagctacatgaattccttgcaaaaggtaactctgtaacactatcgcacagcacgtatcattggtgcaccgcacactcaggaatttaaaccatattttctctgtgaaccacctgaaatcagttcatgtcccttcacagccaggctctcctttgggcaatggttcttagatttccaagggcatcctatccctggagggcatggctgatggctgggccccacccctgcagtttctgattggtagacctggggtggactccggggtggacacgtgaccctgatgctgctttaagggcaccaataatctaaatgtaagagccaggccacactggggcaaatcttggctctgccacttactagctgtgtcctgttactcaccatttaatgtctctgtgcctccagacccttgtgtaaaatggtgaatgaggagtgagtgattggtctttgtaaagcacttagaacagtacctactgcctaccaaacgttgagtggtgtctactacatgataacaccacaaatcatgcctccttctgttattattattaccatcatcattattattggatcataactctcttgagaatccctgcagagtttcacgttgggggaactcaaatgggtaatatttaaaacgggactataagccaggcacagtggctcacgcctgtaatcccagctactccagaggctgaggcaggaagatcacttgggctcaggagttttagaccaacctgggcaacataacgggaccccatgtctgaaaaaaaaaaaaggaaagaaagggattgaaggagcttgccaagggtaggctgcctaaattcacattttccctgggtctttccgtgaaatggggacaccagaaacccaagggtcgggtctagtgccctcaactctctggggatgagagtcttgccttggggtagacaagaggcagggcagggaggagcagagccctggggtgcggccgtcctcaccgcctgttgctctactcaccccagtgcaaaccttcccgtggccgcaaacgtggcatctgctggtgcgtggacaagtacgggatgaagctgccaggcatggagtacgttgacggggactttcagtgccacaccttcgacagcagcaacgttgagtgatgcgtccccccccaacctttccctcaccccctcccacccccagccccgactccagccagcgcctccctccaccccaggacgccactcatttcatctcatttaagggaaaaatatatatctatctatttgaggaaactgaggacctcggaatctctagcaagggctcaacttcgaaaatggcaacaacagagatgcaaaaagctaaaaagacaccccccccctttaaatggttttctttttgaggcaagttggatgaacagagaagggaagagaggaagaacgagaggaagagaagggaaggaagtgtttgtgtagaagagagagaaagacgaatagagttaggaaaaggaagacaagcaggtgggcaggaaggacatgcaccgagaccaggcaggggcccaactttcacgtccagccctggcctggggtcgggagaggtgggcgctagaagatgcagcccaggatgtggcaatcaatgacactattggggtttcccaggatggattggtcagggggagaaaggaaaaggcaaaacactccaggacctctcccggatctgtctcctcctctagccagcagtatggacagctggacccctgaacttcctctcctcttacctgggcagagtgttgtctctccccaaatttataaaaactaaaatgcattccattcctctgaaagcaaaacaaattcataattgagtgatattaaatagagaggttttcggaagcagatctgtgaatatgaaatacatgtgcatatttcattccccaggcagacattttttagaaatcaatacatgccccaatattggaaagacttgttcttccacggtgactacagtacatgctgaagcgtgccgtttcagccctcatttaattcaatttgtaagtagcgcagcagcctctgtgggggaggataggctgaaaaaaaaaagtgggctcgtatttatctacaggactccatatagtcatatataggcatataaatctattctttttctttgtttttttctttcttcctttctttcaaaggtttgcattaacttttcaaagtagttcctataggggcattgaggagcttcctcattctgggaaaactgagaaaacccatattctcctaatacaacccgtaatagcatttttgcctgcctcgaggcagagtttcccgtgagcaataaactcagcttttttgtggggcacagtactggatttgacagtgattccccacgtgtgttcatctgcacccaccgagccaggcagaggccagccctccgtggtgcacacagcacgcgcctcagtccatcccattttagtctttaaaccctcaggaagtcacagtctccggacaccacaccacatgagcccaacaggtccacgatggatccaccagtcccaccccagccttttcctttcatctgaacagaatgtgcatttttggaagcctccctcactctccatgctggcagagcaggagggagactgaagtaagagatggcagagggagatggtggcaaaaaggtttagatgcaggagaacagtaagatggatggttccggccagagtcgatgtggggaggaacagagggctgaagggagagggggctgactgttccattctagctttggcacaaagcagcagaaagggggaaaagccaatagaaatttccttagcttccccaccatatgtattttctaggatttgagaggaaagagaggaaaatgggggaatgggttgcaaaatagaaatgagcttaatccaggccgcagagccagggaaggtgagtaactttaggagggtgctagactttagaagccagataggaagaatcagtctaaactggccatgctttggaagggacaagactatgtgctccgctgcccaccttcagcctgcaatgagggactgaggcccacgagtctttccagctcttcctccattctggccagtccctgcatcctccctggggtggaggatggaaggaaagctgggacaagcagggaacgcatgattcagggatgctgtcactcggcagccagattccgaaactcccattctccaatgacttcctcaaccaatgggtggccttgtgactgttctttaaggctgaagatatccaggaaagggggcttggacactggccaaggagaccccttcgtgctgtggacacagctctcttcactctttgctcatggcatgacacagcggagaccgcctccaacaacgaatttggggctacgaagaggaatagcgaaaaagcaaatctgtttcaactgatgggaaccctatagctatagaacttgggggctatctcctatgcccctggacaggacagttggctggggacaggagaagtgctcaatcttcatgagacaaaggggcccgatagggccagcagccacaaggccttgacctgccgagtcagcatgccccatctctctgcacagctgtcccctaaacccaactcacgtttctgtatgtcttaggccagtatcccaaacctcttccacgtcactgttctttccacccattctccctttgcatcttgagcagttatccaactaggatctgccaagtggatactggggtgccactcccctgagaaaagactgagccaggaactacaagctccccccacattcctcccagcctggacctaattcttgagaggggctctctcttcacggactgtgtctggactttgagcaggcttctgccccttgcgttggctctttgctgccagccatcaggtgggggattagagcctggtgtaagtgcgccagactcttccggtttccaaagttcgtgcctgcgaacccaaacctgtgagtctcttctgcatgcaggagtttctcctgggcagctggtcactccccagagaagctgggccttcatggacacatggaactaagcctcccaaatgggagttctggctgagcccagggtggggagatcctgggaagggaggcactggaggaagacggcacctcttcccccatggcagggtgtgagggaggcaggtttggaatggtgcgagtatggcaatctaagcaggggtctggtctctttgactccaggctggcctttggccgactgtctgctcacccagagaccttggactccggactatccatggctccgaatctaagtgctgcccactcccatgctcacacccacagaaggtcttcccatcccctttagattcgtgcctcactccaccagtgaggaagatgcctctgtctttcccacgactgccaggagatagggaagcccagccaggactgaccctccttcctccagcctgccctgacccacctggcaaagcagggcacatggggaggaagagactggaacctttctttgacagccaggcctagacagacaggcctggggacactggccccatgaggggaggaaggcaggcgcacgaggtccagggaggcccttttctgatcatgccccttctctcccaccccatctccccaccaccacctctgtggcctccatggtacccccacagggctggcctcccctagagggtgggcctcaaccacctgctcccgccacgcaccggttagtgagacagggctgccacggcaaccgccaagcccccctcaaggtgggacagtaccccggacccatccactcactcctgagagggctccggcccagaatgggaacctcagagaagagctctaaggagaagaaaccccatagcgtcagagaggatatgtctggcttccaagagaaaggaggctccgttttgcaaagtggaggagggacgagggacaggggtttcaccagccagcaacctgggccttgtactgtctgtgtttttaaaaccactaaagtgcaagaattacattgcactgtttctccactttttattttctcttaggcttttgtttctatttcaaacatactttcttggttttctaatggagtatatagtttagtcatttcacagactctggcctcctctcctgaaatccttttggatggggaaagggaaggtggggagggtccgaggggaaggggaccccagcttccctgtgcccgctcaccccactccaccagtccccggtcgccagccggagtctcctctctaccgccactgtcacaccgtagcccacatggatagcacagttgtcagacaagattccttcagattccgagttgcctaccggttgttttcgttgttgttgttgttgtttttctttttctttttttttttgaagacagcaataaccacagtacatattactgtagttctctatagttttacatacattcataccataactctgttctctcctcttttttgttttcaactttaaaaacaaaaataaacgatgataatctttactggtgaaaaggatggaaaaataaatcaacaaatgcaaccagtttgtgagaaaaaaaaaaaaaagccgaaaaaaaaaaaaaaaacacctgaatgcggaagagctcggctcccgtttagcattttgtacttaaggaaataaaaaaccaacaaaggatctcacattttcttaaaaagtgaagattgctgtatactatttattcaacttataatttatgttactccttgatctttgtcttttgtcatgacaaagcatttatttaataaagttatgcattcagtta

SEQ ID NO: 100 - DNA, 22455 bp, Homo sapiens
agtcacatttcagccactgctctgagaatttgtgagcagcccctaacaggctgttacttcactacaactgacgatatgatcatcttaatttacttatttctcttgctatgggaagacactcaaggatggggattcaaggatggaatttttcataactccatatggcttggtaagaaccttcactcatgagcctcttgttgagaatgtcaattctttaaatcatggagaaggaaatttaaagcagtaactttttctattctgtacaaggctgatgttctcaaagaaaatgcttaggaaagatagcctttggaatacatacgcttttttttttttaagcgttcttgtcctctaaaatttaaaaatagcattttataaagtgaattgttcagtagaaaatagcagttaatatttatattcagtatgaaaatatatttttaaacttttcaaagcagatgtagtagtacagtgaggagtatttctttaaccaactagaaactccaatatagtcttctgtttttatgtcaatgcatttgcaatcagatttcagaatcctaacaggtaaattggagtctacgaaaattttataataattgcttcatggactctgagctatagtctatatcttagttttttcaaacattttgactattttgaccaagccagcttgcagtacagaaaaaagtgaaaaatgtttctccttctgaatgcattcttaccactttgattctttctgtttctactatccatataaatacttttctgacccttttgttagacaaggaaagtttcttttgttattttgttttgttaaatgtaaggaatgagacaggccaaacagtgaagataaacaatagatcaaaaaaggaaaatgcagaaaatccaaaacaccccttagattacagtatgctaaacaatgctttaattctcatgatacaaattgatattgctctatgttcattattgtgtttaatagtaaaaaaaaattgaatttcttggggaaaaatgcatagattcttgcatagaataaagaaataaagagaaggcgaaattaacctagattttgattttatgctttctaaacagcacagttgtagaatattttccctttcagcatgtttctctctggtaataactgcaaccatgcggatttcattaaaaagcctaatttgtaatgcacagccttgccgcctatttttttcagcttgagccagtgaactaatttcactgtgatccatttggccaagacgggatctgaaatttagtagaggaatgagcccatctctttattttagttgaatacagtcaaatataggaaatacactcatatttgtcaggattttttttaaatgtcataaagctagtaagaattaaatccaggcagataaactttgaaatattatcaaaccctctaataatcaagtaatttagagttgtcttttaaagtgttgtcatatgttacaaaaatataaacctggacaatagaagttttgccccagaggtagagagaagcaaattcaaacgtctattaatgtatgctacaaatctgagggtcaggataattgcaaattgcttcaatctggggcaaatttttgaccagccagcctagcacagatgtttatagttggttggatcaatataatctttttagaaaccatttaggaaggaaagatagttggattagaagggatacatctgttagcaactatcaagaacaggacactttaaatctagggtgtcccatcttttgccttccctgggccacattggaagaagaattgtcttgggcaactcataattttttttttttttttttttgaggcagagtctcgctctgttgcccacgctggagtgcagtggcaccatctcggctcactccaagctccgcctcccaggttcacgccattctcctgcctcagcctcccaagtagctgggactacaggcacccgccaccacgcctggctaattttttgtatttttagtagagacagagtttcaccatgttagccagggtggtctcaatctcctgacctcgtgatccgcccaccttggcctcccaaagtgctgggattataggcgtgagccaccgcacctggcccagggaactcataatgttttaagaaagtttacaaatttgtgttgggccacattcaaagccgtcctggcaggccgcaagttggacaagtttactttaaattctctaggttatggttccaatctggtaaaatgataaggttgaagtaaaggatccctaaggcttattttaactctggtatcatctaatttttaaaatagtacttaaaacaaaaacaaaccacagttaaggacaagaaattacaatcattttacatggatcatgagaataaaaaatgcacagataagcaattatttttattgttgaatctgaaaaagaagggaaaggaaggtgggatgcagtggttcacacctgtaatcctagcactgtgggagtctgaggtgggcagattgcttgaccccaggaattaaaaagaccagcctgggcaacatagagaaactctgtctctaccaaaaaaaacacaattaactgggtgtggtggtgcatgcctgtagtcctagctactcaggaggctgaagtggaaggatcacttgagcccaagaggcagacgttgcagtgagccgtgacctcaccactgcactcaagcctgggtgacagagtgagaccttgtctcagagaaaaaaaaagaaagaaaggaaaagtgacgtatcttgagttccttctatggtccagaagctatcattagtcccatttgacaaatgaggaaactgaggctcatctggttatacaactccatggtagaaacagcagtggaaccaaagtccatttctactgccgccactcactaaaaggagaaaacatttattaaacaaattttcagttttaataaatgactattgactagataaattaataaaatattattgcttctgaaaggtaaaattaggattcattgtacaaaggtccatcttaatagctcaaaattctgaattgagaaatatttttaataaaacaccttatttaaaattgtcaggtacatactccaagagttctctatttgttcatatggcaacatactgggaagtttggcgctattagaggaacaatgtggaatgttaatatttaataaattaaatcagaaattataacaaaaattttttgctatttctgttattatgttattactagacaagtttcagtaggtaccaaaagtttaagaaaaattactgagggtgggagaagggagaggaacagaggtactgggtttaattcctgggtgatgaaataatctgtacagcaaacccctgtgatgtgagtttacctatgtaacaaacctgcacatgtacccccgaatttaaaataaaagatttttaaaaaatgaaaaattacttggaggaaaacttaaaattattatttttttaaatctgttaatttttttgttttgttttggtttggtttttttgttttttgagatggagtctcactctgtcgcccaggctggggtgttgtggcatgatctctgctcactgcaactctgcctccctggttcaagcaattctcctgcctcagccttccaagtagctgggactacaggcgtgcaccaccacacccggctaatcttttgtatttttaatagagatggggtttcaccatgttggccaggctggtctggaacttctaacctcaggtgatccacccgcctcagcctcccaaagtgctggaattataggcatgagctaccatgcccggccaaatctccgttcattttttccgtatacatcacattttaattttgaaataaaatatgaagaaaatcagtttgagaaaactttgtatacattaaaataatttttacaaaatttgttttcaaatacaggtcttttaatctgtattcttaggaaatataatttttaacatttttaatgattaacaacaatctctattataatacgtaagtaagctaaacaggcctcctgtctctaccaaaagctttagtgttcctctatttcaagataaagaaattcaaaatattcactagtgtccaagttccttgaggatagaacctgacccacagcacctagcaaaataccccgtggtatgatgttcaaagtaactaaattgaaaactagcaaaagtttaatgaggctttgccgtatgaaggacactgggcagcaggcatctttcaatagagaaacaacttgactgatgttcctggtattctctgacctcgagcatcagattgactaaggtcctctgtgtgtgagtaatgggatttactatgtaatgtataagagcaggatccttggagttcagaaaaacaagcaccctctcttattgagctgtggcaatgtcaacttcagtttggggtggaaaacaaagaactatatttctaattctcctggattcatttcttggtgccaagaaatatgtatgtcctcactgcaaatggtcctaagggtggctgattgcacaggtcagaatacagagacttaaccataatgtcagactacatagaactattagagctaactacagagctaatgttatgactattgtcctgggaatcttttcacattgtttctatggtagaagggactccaaactcaaaacaatccatttaaacagtgatctattggaagacaactcatgtatgacttaacactgcctaaaatatgttgggaaaaatatgtgaactaaaaaagacaaatcagataaaaaattgaggcattaactggtagttaggtgtgtccagttttttctctgctgtgtttgaatctatttttcttttccctaatttagtatttgctttggatcccttcagatctttcctcagtttttatttgtcttactaaattcttttttttttttttttttttttttttttttgagacagagtctcactgtcgcccaggctggagtgcagtggcgcaatctcggctcactgcaagctccgcctcccgggttcatgtcattctcctgcctcagcctcccgagtagctgggactacaggtgcctgccaccacgcctggctaattttttgtatttttaatagagacagggtttcaccgtgttagccaggatggtctagatctcctgacctcgtgatccgcccgcctcggcctcccgaagtgttgggattataggcgtgagccaccacgcccggcctaaattcttaattatattgcattagtcattgccctcaattggatattttagcttatttttctacgtcattgtgagcctacataatggatccatcttcactagtttcttttgccttcacctccttttctttcccctattgcttacctttgcacgtttttatatagcttaaatccaacagaaagccaaaactttatcacctgtggatagtgttgcaatacaatgttgtattaaaaactttattttaggccggacacggagtctcacgtctgtaatcctaacactttgggaggccgaggcaggtggatcacttgaggtcaggagttcaagactagcctagccaacatgatgaaacctcgtctctactaaaaatacaaaaattagctgattgtggtggcacatgcctgtaatcccagctactcggaaggctgaggcaggagaatcgcttgaacccaggaggcggagattgcagtgagcccagattgcaccagcctgggcgacagagtgagactccgtctcacaaaataaaaatacaaaattaaaaaaaatgaaaactttatttcaggctatcgatcaaaaacacaatttaggccaggcccagtggctcatggctgtaatcccagcactttgggaggccgaggcgggtggatcacgaggtcaggagatcaagaccatcctggctaacacggtgaaaccctgtcgctactttaaaaaaaaaaaaaaaaattagccaggcgtgatggcgggcacctgtagtcccagctattcgggaggctgaggcaggagaatggtgtgaacccgggaggcggagcttgcagtgagctgagatcgcgccactgcactccagcctgggagacagagagactccgtctcaaaaaaacaaaacaaaacaaaaaccaaccaaccaaacaaacaaaaaaacataatttagcctaaagtttctgtttatggccccaaattcccctaaaattccccctcattcagatttttccccaaagtttcctaacagtgaaaacttagctacccaaggcagccaacccagaaagccctttggcaggaacaatagctgttgtaatcttccagctgaggccacagaatttcccctgttccgtaagaaggaacaacagtgcttttatgacatcatctgattttgcagaacgagcagccggtgtgtaccacagagaagcacggtctggcaaatacaagctcacctacgcagaagctaaggcggtgtgtgaatttgaaggcggccatctcgcaacttacaagcagctagaggcagccagaaaaattggtaactgatttcacaatgatttttcttcttttttatccttggaggaaaaaaatccatctttcctaagccctagtaagacttctttctccaacccccttctgatatatcactaagcccctaggacatttctgctctctgacttctcctatccatctgcctagagttggcagacagttcctagtaccaccaacttatgtggagtcttaacccagtgtgacctaataaaatacaagtcaaaagaaaatgaaaacctcattatttcaatattatttaaatttctcattaatttcaatgccattgctattctttttagtattgttctatctctttgacttctcagtatggtggctgttaaatgatgctatagtactatattgagtcttacaaggaaatttacttggtagagaaatattgaatttagtggcttttttccccaatttttttccattaagtgggagaatgtatttgtacttcaggatcaaaagctataaggaaaaggaggacaggaaggtcgtgagatagaagcagaaagaaactgggaagatggtatcagaagacctggtgaaaatcccagcaatcaactggtgttacatgcttctttatacaaaagtggattgctaccatctctcttggcctttggggagaatgggccacccccattcagaactcctttgctgactggataacatccggcaaagttgatacattactcaagaaaaaaaataagagtgttttctcaaatgccccaaagcctccccagatgactgctggtctgtaatcagggggcggcatggggcatagtaactggagtggaagagacaaagcccatagtctttactggccatcctggacctctagtaaaattgctcttggtggcattgacagatactaaaacagcctctgaggctgagcaaaggaaacagggctgagcctttgtttgaaatgtatgagagaatttatctttattcaaatcttctaaaacattatgaatatctgatagggtgcagtggttcacacctgtaatcccagcactttggactgcttgagctcaggagttcaagaccagcctaggcaacatagcgaaacctcatctctacaaaaaaaattaaaaaattagccaggtgtggtgatgcacacctgtggtcacagctactctaaagactgaggtgagaggattgcttgaacccaggaggtggaggctgcagtgagctgtgttcatgccactgcactctagcctggatgacagagcaagaccatgtctctaaataaataaataggccaggcgtggtggttcatgcctgtaatcctagcacttcggaagggtgaggtgggcagatcacttgaggtcaggggtttgagaccagtctggccaacatggagaaaccccatctctactaaaaatacaaaaattagctgggcatggtggtgcatgcctgtaagcccagctattcaggaggctgaggcaggagaattgcttgaacccaggaggcggaggttggagtgagccaagattgcaccaccccactccagcctgggtgacagagtgacactctgtctcaaaaaatagataaataagatattacaaatatcttaattgatcctaaaatagaaattaaattaccacttgaaaatattttttcaaaattgataatttcagaaattgtctcatggcattccatacgtcatttgtgaaaagaagccagctctgaacttggattagtttcatacccacaataatttgtagtccatttgcatttttttcaagtaagaggtagttttccaataaaaatcagaagttatatttcatgtgtattcacactttgtctaattaaggaagcaattttctcccttttacatgaactggatttgaccagttaagaaacttactattggaagtggctatctttgctaagatgacttttgcttagccaagacagtttacctgtttagtccataactctttttcttcttgcaggatttcatgtctgtgctgctggatggatggctaagggcagagttggataccccattgtgaagccagggcccaactgtggatttggaaaaactggcattattgattatggaatccgtctcaataggagtgaaagatgggatgcctattgctacaacccacacggtgtgttaaaaataataattttatgttttgcaaaaacagttccatgctgctaagaggttgttaaaaaagaaatggctactttttccagaaataattgattttggtaataataactactactaataactacaattcataaagtgcttatactatacccgacattgagttgtgttccttcgtctacactctaacttaatattcacaataattcttcaaggagctattgttatacctattttagaaatcaggaaattgaaacttagagaattaagtaaccccaaatcaggagtcaataatgattaggcagatgggactgagaattcagatcttctctgtgccagggaacttcccagccataaagaaaaagaaaataaaaaagcagattaaaaacttgtcacagtaaattagctaaaacaataaagtgatgctaccaaatggtaactattcaaaattgtccttttgatacaacggggaaaaggagacaaagtaaacaaataaattctttccttaatttctttttgtgtatatatgctagtacttccaaactaagcaactctaattctatggtttaacaattatatactgtatatactagctatcattataccatatatttttattcatattttttccatgtttgcttgcaactaggaaataatgagaaaattaactcataattactataaagaattattcttaggtcacgttcttggagaaaaagtaggctgttctttttgggtatatttccaccaggacaatgttacaaaatattacagtatgttacaaagtcttcctggcatttaggatcataaacatcctcagatgtgtcccatttggatttaccctataagaaattccataacacagtaggagagttacatagtgaggttttagtgtattattataaaatctattatttaattatattaacatttggagaatagtttctcatgtctgtaactaacctatatctcaaaattatgtgtagtccaagtagaaagatttttgcctacagctacaactagtcttaactgagacaaaataggaataaatacttaacagtgcatttatgtaactttaactttcaagtcactttgacatgctttaagcttatttagtcctatactatacagtactaatttagtcctatatttagttatgtcaacaatatgtatcttcctttcctccctccctctcttacattttcttaaatatatttatgcagaccactcttttttactcttaagagtaactcttcttttcaaatgtattctctgattcttctttcacttgataaactttaggatctctgagcttccactggataatttccatagattaaactctagagtcattgaagaagtgccaatgaaatggtcctttcagtatttcattgccctttcataagaatataatcctaaattataaattattataagttgctttcttttctcagagaggctgaatacactctgggaatacagaatcctgggagatttgtttttacccaattctcagtgcatttagctcgcttttggatttggtggtatgctgactatttaggatgtggttaacttgaaggagacttgaccgcctgaactagcactgggggaacagctcactgaaacatcactggaataaaaaaaaaaaataatggcttcacaaaaataaagcaatcattattgattaatcaatgtcaccaagttagagctgatattctaaataatagatgaggcagtaactagatataacataaaatatagatctaaataaatatagccaaataggcagccaaattagttcaatatttgaattttttctaatctattaatatatacaacaaagattggatgctatgggatggaacaactcgctcctaaagctggcaatgtacatccttatgcagacatacaaactatgtgttgtatattttattatacagtaagaatagcttatgggttgcataacatccttaaattattttctgtattttatccttagaataaccctgtgtgatagataatgggaaaggtatggctacatttattttaccaatgaagaaaatgaagtgtagagtagtcaccaagcttgaactagatccttgaccttcatttgttgctccccagcctttctatgctcctgttctgctttatttcatcaaagcagaacaggagcatagaaaggctggggagcatcttttttctagacattagacacttacctgatatggaattaaaattaaccagggcttcttcctagctttccctctaggtcatattgcaaaccactgattctgagacagcgtttttgttttgttttatatgtgtttgtttttcttatgacaatttataacatattgaaatctgttaaatgatgaatgacttggaaaaacaaacatgaatatctccatcaaatcttaaaatattaggattagggtattagtttaaaatcagtaaaggcagtatacagaataattataaattattccttttaagtggattagagtgactttaaagtctcttgcgatcatgaaattgtataatgattttccaagcagaatttatgggatccattattctaagtgcttgtggccctgaagacatatggtgacaccacagggcaaagtccctaccatcttgatagggctgtttgtaatataaatgtgtatatatttgtcaaaatacatagacataggccaggtgccatggctcacacctataatcccaacactttgggaagctgaggtgggtcgatcaccagaggtcaggagttcaagtccaacctggcccacatggcaagaccctatctctactaaaaatacaaaaattagccagacgtggtggctcatgcctgtaatcccagctactcagaaggctgaggcataagaatttcttgaacaattgcagaggctacagtgagccgagattgtgccactgcactccagcctgggcaacagagtgagactccatttcaaaaaacaacaacaacaaaaaataggcgtgtgcacaaaagacttgttatgttatgccttaaaagataaaataaaaatatttttaaaagtacaattaattacattacaattcttttaattttaaaatttatttttatttttattttttagagctggaggtctcactatgttgcccaggttggcctcaaactcctaggctcatgagattcttctgcctcagcctcccaattagctgggactaagggtgagcatcactacacctagccatttttttcttactatatttacttttttaaaattcatggctgggcacagtggctcatgtttataatctcagcactttcagaggcagaggcaggaggctcacttgaggtcaggagttcaataccagcctgggcaacattgcaagatccatttccacacaaaaaaaataaaaattaccagggctgggtggcacatgcctgtcatcccaactacttaggaggctgaagtgggaggattgcttgagccaaggagttcaaggctgcaataagctatgattgggtcaccgcactccagcctaggtgacagagcgagatcttgtctcaaaatataaaaataaaaataaattcacaaagagtccatgttcattttagagaatttagtaactattgatgaaaaaatacatttattctttagctaaaagcatacataatataccatagatgctgtatactaagacatttaacatttcataaaaagtaatagattgctaagaaatgtcatttttaacagggataatgtttttcctaatgctttggggtttttacgttttttttcttctcatttcagcaaaggagtgtggtggcgtctttacagatccaaagcaaatttttaaatctccaggcttcccaaatgagtacgaagataaccaaatctgctactggcacattagactcaagtatggtcagcgtattcacctgagttttttagattttgaccttgaagatgacccaggttgcttggctgattatgttgaaatatatgacagttacgatgatgtccatggctttgtgggaaggtacgtatgggtccccatacaggaagttaaatgaacgtccagtattttgtttgatgcttctttaattttccctcaactgtccctataatattgattttggaatagttctactctcctaaagcaccatatcatttttcaacaaagatttttcttagctggctgctacaacatacttattaaagcagtgagagtgccttttgattatggctaagttgtaagaactagttagtctattttataaacacctcaagatctgactacaacatacttattaaagtagtgagagctgccttttgattatggctaagttgtaagaaatagttagtctattttataaacacctcaagatctgactataacatacttattaaagtagtgagagctgcctttggattatggctaagttgtaagaactagttagtctatgttataaacacctcaagatctgactaacaataggaggaagaaagatatgtgagttgcaaaaattgttcaggtttttaagttctaatttcttacaaccttaaaaatgattatagggccgggcacggtgtctcacgcctgtaatccacaccactttgggaggccaaggtgggtggattacctgaggtcaggagttcaagaccagcctggccaacatggcaaaaccctgtttttactaaaaatacaaaaattagccgggcgtggtggcaggcgcctgtaatcccagctactcaggaggctgaggcaggagaatcacttgaacccgggaggtggaggttgcagtgagccaagactgcaccactgcactctagcctgggtgacagagcaagactctgtctcaaaaaaaaaaaaagattataaattcagtaattgttgcctttcttcttcctacaaagcattgtgctaagtattatggaagtaaggtaaataagcaaagtttaaccctttctctctttaatatttttcctttggcttttcaacatgctagaacacaaccttttccttcacactccaaatctttaatatactttgaattttgagtgtcttatgatatattgcaaattaaagagtgtacaattaggtattttatatattcaggtccccacctaataacccatattttagactatcaattatcaatagactatcagttttcaattctctattatacatgatagtaatttaatggggaaaaaattgtaatggggacaatttaaaaatgacaaactcaatccctttttatgttgattttgaatgtgtaatttaaatacaaagaaaaccaaaggcatttcttgcaaaaatgaagagttttttaagggaaaatattttttgttttgttttcttctttctacatctttttttctttttttttttcttttttttgagacggagtctcactctgtcaccaggctggagtgcagtggcacaatctcggctcactgcaacctctgcctcccatgttccagcaattctcctgccccagcatcccgagtagctgggattacaggcgcctaccactacacctggctaatttttgtatttttagtagaggtggggtttcaccatgttggccaggctggtctcaaactcctgacttcaggtgatccacccgcctcagccttctaaagtgctgggattacaggtgtgagccaccgcacctggccttgttttcttctttagctgacagactactgctatagagaaaagatagtttataaaaatagtttgatgaagacacaaagtagagttggggaattaagaacaaagtacaggcaggcacacctgtggtcccagctactttggaagctgaggcaggatgagcacttgagcccagtagttctgggctacagtgcgctatgctggtggggtgtccacactaagagcagcatcaatatgatgacctctcaggagtagggtaccaccaggttgcctaaggaggggtgaacctgcccaggtcagaaacaagcagattaaaactcccgtgctgagaattgggaaggagcctatgaataaacattgtatttcagcctgggcaatacagcaacatcctatcttatataaaataataaactactgtctttaggaggtttgaacaggctaatttgttatttcttggatttatattatataatttaccctttaggtaaatttagacttttcctctagaataaattacatatttagaaacctgtaaaacccttacctttttatatgtgtaaaagggttcctttcaagtcatgattcagataaaaatcaaatccttttacacctataaggtccaaaataatttttccagatttaaatcagtctatcctagaattcaaaatattaatatcaccaagcatatgcccattcttctacaactgtgaagaaaactttataaaattaattagaaataaatttttaaggctggacacagtggcttatgcccgtaatcctagcactttgggaggccgaggcagttggatcacctgaggtcaggagtttgcgaccagcctggccaacatggcaaaaccctgtgtctactaaaaatacaaaaattagtagggtgtggtggcacatacctgtaatcccagctactcgggagcctgaggcaggagaatcacttgaacccaggaggcagaggttgcagtgagctgagattgtgccattgtactccagcccgggctatagaccgagactccatctgaaaaaaaagaaagaaaattttaatttttccaaatagattcaaattatctgctgcacaaaattttctagttacacaaagtaaaaatgccacacatatctttcctttaaaatctcattggctgggtgcggtggctcacacctgtaatcccaacactttgagaagctgaggcgggaggatcacctgaagccaggagttcaagaccagcctggccaacatggtgaaaccccatctttactaaaagtacaaaaattagccaggtgtggtgcatgcctgtaatctcagttacttgggaggctgaggcaggagaatcgcttgaacccaggaggaagaggttgcggtgagccgagactgcgccactgcactccagcctgagcgacagagcaagactccatctaaataaaataaaataaaataaaatatcatcaatattgtaagaagattatttcaaataacaaactttgttttaactcctactctctcttacaaatccaggtaaaataacaatagaaattttaaaaattatggaacaatgagctattacttagaggcttaattatcagtaacagccactttactagctgtataatattcatttgtgtgacatctcttttctaaaaattccttttcagatactgtggagatgagcttccagatgacatcatcagtacaggtaaggttttaaattgaggaccaaaactatgatttgtttctttacagtgtccctgaaagtaaagggacactgttaaatagtaaatagtagttattattcactttttaaagttgaaagaaccaacaccagatgcagcttgctaggttgtaaaatgcaaaaaaaaaaaaaaaattaaagatttatgccaactgcttgcactaaaaaatgtataaactcttctttgctgaaaatgtaatgtatctgagagtcttgaatctgcaaatccacaaatattgctatagtttatgatttccataaatgtgctaataaaatggctgaaatttttcattgataaagggttgaagtcatttataaagtcattaaaaatctttgtcactaaaacaatcttacatcatattcattacatttttatcttagtacaatattctccagagaatgtttcaaataacaaagttctgtgagatttaaatagatgttacatgagaagagggctctaaggtcaaataaatttggaaaacgttgggttaaacaatatcaaacaggtttcttcactggaagacagcagggatcttttaatatgctaatcatgtgtagtaaatctgaaaagaccagatataataggtagtgctttccaaatattgcccacccccccattattttctgtgactttgttccaagaaatgtacctcaagaaatgccctgtagtcgcataaatttatctcaatatgcaatatcactctttaatttatcccatactgctattttctggctaaaaacttcctttcttacatgtattcagtattttattttatttccatcaccagcaccagcagctggcatttttaagtgctctattttctcccaagtcataaaactatcacagtacttctgcaactataaacaacaaaactacattgagttgcaatttctaagtactcagatactactagttaacttactcccacaccccagcctttcagtgactcaattctaatttattcgtcataactgtaacagatggaacttcctgctctgttatcgaatgattaatgcttaaaccttgttagttcattattctgttacaaactcccttaagaaagataacctattaaattaaaccgtttacttatctctcattcctttcttgaaaatatattttatattaacagaaagttgaaagaaaacatcttattgctgtaggaggtagttgggggatgagaatcctattaaacaaagaagttaaaaagaagcctaggccaggtgccgtggctcacgtctgtaatcccagcactttgggaggccaaggcaggccgatcacctgaggtcaggagttcgagaccagcctgaccaacatggagaaacaccgtctctaccagaaatacaaaattagccaggcgtggaggcacatgcctgtaatcccagctacttgggaggctgaggcaggagaattgcttgaacccgggaggcagaggttgtggtgagccaagatagcgccattgcactccagcctgagcaacaagagcaaaactccgtctcaaaaaaaaaaaaaaaaaaaaagtctgaaattttacattttccttttttctctaaagtagacaacttactccaaatgtaatcaaatcagtggtggggttttattggcacaacttcaagaaactgggaaaaaaaaaacccacacaatttatcattcaaagagaaacaaatcaagaaacagaaaagaatatagttaaaacaaaaaagccaaagatttagcaaaaaatcaggaagaggacattgatacaaagtaatagaaaaagaagatataagatacagttaacataaaatcctatcaagcataggcctggtgtggtggcttacgcctgtaatcccagcacattgggaggatgaggtgggcggatcaccaggtcaagagatcgagaccatcctggctaacacggtgaaactccgtctctactaaaaatacaaaaaattggccaggtgcagtggcacacgcctgtagtcccagccacttgggaggctgaggcaggagaatcgcttgaacctgggaggcagaggttgcagtgagctgagattgtgccactgcactccagcctgggtgacagagcaagaccccatctcaaaaaaaaaaaaaatcctatcaagcataatactattaacattttgatctggttttctttttaaatatacgcttactcaacccagggtatagattacaaaacaaaaatagaaaataaagacattggccaagcatggtagctcgtgcctataatcctagcactttgggaggccaaggtgagaggcgtgagcctcaggagtttgggaccagcctgggcaacatgatgcaaccctgtctctacaaaaaaatacagaagtcagccgggcacagtggctcatacctgtaattctagcattttgtgaggccaaggcgggtggatcacttaagatcaggagttcaagacagcctggccaatatggtgaaaccccatctttactaaaaacacaaaaaattagcccggtgtggtggcacgtgcctgtaatcccagttactcaggaggctgaggcaggaaaatcacttgaacctgagaggcagaggttgtagttagctgagatggctccactgcacgctagcctgggcaacaaagtaagattccctttcaaaaaaaatttaaaaatacaaagttagccaggcatcctgatgcgtacctgtagtcccagctactcgggaggctgaggtaggaggatcacctcagtccagggaggtcaaggctgtagtgagccatgatcatgccactgctctccagcctgggagacagagtgatattctgtctcaaaaaaaaaaaaaaaaaagaaagaaagaacctgaaattgtccataatcctaccacattaataagagatataaaagtaaggatgtgcctactctcctcacctctccatcccagaaaggcatttgataactctgtagtgaccatccttccagatgtttttctattatacaaacattatatatgtggaaactatggacatatttccatgtcagagtatgatatttagatcattcaaattctttttcatgactgcctaataggtcactgtatggatatactgtaatttgtcatgtactaatatttaacattctgaggcatttgattctgatttttttcttttgttattcaacgtttcaatgaacattttaaaacctctgtctttactcagtaattctactttaaaaaaaaatagattcctacagtgccaatttacatttctttttcttttcttttttttttttttttttttgttttttttgagacagggtcttgttctgtcacccaggctggagtgcaagggcgccatcacagctcactacagcctcaaactcctaggctcaagtgattttcccgcacaaggctaatttttattttttatttttagtagagatggggttttgctatgttgcctaggctggtcctgaagtcctgaattcaagctgtcctcctgcctcagcctcccaaagtgctgggatttcaggcataaaccaccttgcctggctgactcccaatttacattttcttttcttttcttttcttttctttttttttgagagtgagtctcgctctgtcgcccaggctggagtgcagtggcaggatctcggctcactgcaagctccgcctcccgggttcacgccattctcctgcctcagcctcccaagtagctgggactacaggcacccgccaccacgcctggctaattttttgtatttttagtagagacagggtttcactgtgttagccaggatgctctcaatcttctgacctcatgatccacccgcctcggcctcccaaagtgctaggattacaggcgtgagccaccgtgcccggccatttttgtgtttgtttgtttgtttgtttgtttgttttttaataaggcctgtcgactcatacctaaccaatttacattttaaccagctgaatattctctgaattctctcacaatagaagagcaaaaaagtatcattaataatctaagttgaatttttggtagtgtttttgaacacatttttaaatgtctattagccctttgaacacctatgaattgcctatgaatttatatttcttgcatattctttggcgcttttgtctttctcttttttatttctttgtatattagagatattaaccctattttctctcagtctgtctcgtgcaaaattttttttttatatttaggcaaatcttccaaatatgagaaaatagcagtctgagaatcagagcatgaactcggaaaccagactgcctgtgctcaaacctgactctgcccatttagttctgtggctttgggcaagctacttagtagtcactctgtgcctcagtttcttatctgtaaaatgaatatttaaaaagtatccccctcacctcgcagtgttgttgtgggggttaaatgagttaatagataaaagcaagcattaggaatgtatatactctgcttttgtttatatatatttgcagctcatgcctgtgaccccaacattttgggaagctggggtagaaggatcacttgagcacaggagcttgagaccagcctgggcaacatagtgagatcctgtctccaaaaacaaacaaaaagaaggcctttgcctcctttttgaaaaagatataaatattcctatattttatgttatataataaagtttttcctttttatttagcacattttggtctttatattacggtaaaatgtgtttaggtactctgtgtaaagtaggaatctagcttcatttctaataaatgtgaaacttgttgctctgacatcatttagtaaataactcatccacccatcgctggtttgacctgccctgccattctcctgtaattctgtggatgttccttctacaaagagtatcttcttttttttttttttgagacggagttttgctcttgttgcccaggctggagtgcaatggcagaatcttggctcactgcaacctccgcctcccgggttcaaggattctcctgcctcagcctcccgaggagctgggattacaggcacacgccaccaagcccggctgattttttgtatttttaatagagacggggattcaccatgttggtcaggctggtatggaactctcgacctcaggtgatctgcccacctcgacctcccaaagtgctgggattacaggcgtgacccaccaggcccagcccaagagtaccttttaaatacaagagagaggccaactcggtggctcacgcctgtaatcccaacacttgggaaggccgaggtgcgtggaccacctgaggtcgggagtttgagaccagcctggccaacatggtgaaaccccgtctctagtaaaaatacaaaaaaatctgccaggtgtggtggtgcgtgcctttaatcccagctactcgggaggctgaggcaggagaatcgcttgagcccgggaggcggaggttgcggtgagccgagatcgcgccacagcactccagcctgggcaacagagtgagtgagactccatctcaaaaataaataaataaatacaatagacaaaatttcctgtaggatagattggaggaccaaaggaaaaaatacaaacgtctctcaccctgttccatgcggcaatgaaaccacagactcttcagcttgagaatcgacctctgaattctgggaatcttgttcatgaattcttatattctcctatgagaatgaagagtctttgaattgtcagccaaatcaaaggagagtaacatctttgttcttttgcctccttccccgcaacaggaaatgtcatgaccttgaagtttctaagtgatgcttcagtgacagctggaggtttccaaatcaaatatgttgcaatggatcctgtatccaaatccagtcaaggaaaaaatacaagtactacttctactggaaataaaaactttttagctggaagatttagccacttataaaaaaaaaaaaaaggatgatcaaaacacacagtgtttatgttggaatcttttggaactcctttgatctcactgttattattaacatttatttattatttttctaaatgtgaaagcaatacataatttagggaaaattggaaaatataggaaactttaaacgagaaaatgaaacctctcataatcccactgcatagaaataacaagcgttaacattttcatatttttttctttcagtcatttttctatttgtggtatatgtatatatgtacctatatgtatttgcatttgaaattttggaatcctgctctatgtacagttttgtattatactttttaaatcttgaactttataaacattttctgaaatcattgattattctacaaaaacatgattttaaacagctgtaaaatattctatgatatgaatgttttatgcattatttaagcctgtctctattgttggaatttcaggtcattttcataaatattgttgcaataaatatccttgaacaca

SEQ ID NO: 101 - DNA, 38079 bp, Homo sapiens
ccgagctgcctcacccccggccccgggaagggcatggccccggcaaactcccggccgtgactcgcgcgccccggctcggtggatgctcccggcgcaccgctcccgtgtgcggcggcttcccaaggacaggtgaggacccagggtggccagggcgccccagggctgccgtgtctgcctgcagggggtgaagggatttgagacacccaagggaaacactgggggtaaagggcctgcatgcaggcagattgcaccgttccccagcactgtttgaagttgctaagaaatcaggatacctgaattcctgcaattttaagtagctaaggatcagatagggaggagagccggatcttgaaggaggatgcactgaataggtctaattaagcccagacatcccatgcctcctttcctccctctccccaaagcgctccccatccctggctctctctggagaccttcaaccccgccatcccgcgtttctaggaagctgccaacggaattcctaagtgaagcccactctgctcttgcaatcggtgggggaaaggacgcttgaggagcctctttccaagttgctcaggctgtggctacttcaagtctcctctccctcctctcttccccctctccttccccgcctctttcctcctactcttacccaggctttccctggaaaggggacagcccaacgcctagagtgatccgagccatgcaaaaaaaccgggacagtcatcacgcagacaaaaggggtttggtgtccgagtcccgggcggcggggactcgcagggccaccccagccgcgttccgggaaagctcgtaattcatcccgcagccagctcgacgcgacccagcggactctggaagccggccaggggctcagggctgcccgcccggccactccaggttgtctgcccagggccaagacgaaagcagacggcctcacgcccccacccctgcttcccggcggggttcgcagaccgtctctggcggcctagctggcgccaggccgctttctccgcggcggagagacccgaccccgagtccccgggattagggttgtctgggggcgagtttcctgggtctcccgggaggttggtgccggggtgggaggccggacagggagttggggctgaagagtcctatggaacgcccgggccaagtccgcccgcaggcacaggacgctggggactggcgcggctgcccttggaaccagcccagcgccgaggtcaggcgcgcaggcaggggcggggaaagcccgggctctggcgagagagaaaactccgaggacttttgcagagctgcaggagccggtttgttccagcgcccagaggcggagcccggacttgcttttttgcaaaactacctgtgcgccatcagttctttatgggcagctgaagggagacgcgcccccgggcttaagagaataaccttttctaggtcacttaaaggcaggaaaagctacaggtttgggatgttcctctcttataggaaggattttagaattttatttttattttttgagacggagtttcgctcttgttgcccaggctggggtgcaatggctcgatctcggttcaccggaacctctgcctcccggattcaagcgaatctcctgcctcagcctcccgagcagctgagattataggcatgcgccaccacgcccagctaattttgttttgtttgtttgtttgtttgtatttttagtagagacggggtttttccatgttggtcaggctggtctcgaactcctgacctcaggtgatccgcccgcctcggcctcccaaagtgttggatgacagacgtgagccaccgagtccggcctgggttttagaattttaatcagcagttcgcgctcgttcagaacccgggcgaatgggcaggcgcgtgtttgttgtgtatccctatttactttccatgtgtgtcactatttttaagtgaacgccattcaagagatgacaaaaatgttagatgacataggcattgccaggacaagaagaaaatgatcaccgccattctaaatgaagtagctgatgcaatctagctttacccgagcttttccattttttagtgactccatttttttctgtttgcctgaatatatttcataagcagtcccttcctgtttattgaatgatcagaggttcccccaaacttcctccccgattaacagcaactctatatcatcaaaaaaactctctggcttttccaagacaaaaacataaggatagtaaataaacccagaaataacaggatgaatatccttctagcaaatacctctttaagctcttcaagaagctagaattaaaggtttgaaaaatatcattaaaggaaagaatacgaataaacacttcttgggaagttttaaattcaaatatatgcaatatataatggctcagtcttgttggaggcagaaacacaatattttattattttttaattatggatacataaatataaacctctttcttctctctctctctctctctctctctctcgtctctctctgtttcatagccgcaattacagagtgcaagatagatttccaaatcatagtatcgaagccaagaatcaagactatattctatagtcatgattaaagtgaatggtgaaaagtttagaaaaaaaaccatgtttcatctttctcaattcccatggtttaagcgtcactacaacacatcgtgtgaagtcctgggaagcttgaaaccctgatgcacaattcaaatttaaaaattgcccacagttcgtcggtgctacctgtgaataagctcatctcttcgttgttctacctcaggtatccgagaatcaggcaccccgacaagatgcccaagcgcgcgcactggggggccctctccgtggtgctgatcctgctttggggccatccgcgagtggcgctggcctgcccgcatccttgtgcctgctacgtccccagcgaggtccactgcacgttccgatccctggcttccgtgcccgctggcattgctaaacacgtggaaagaatcaatttggggtttgtaccactttcttcccgaaccttcccactgtcagtgcgtgcgtcttgatctggttttgcgtgtgtgtatgtgcatttacttaacttcatatgtgcatttcctctgtgtagctctgtcgagaattatggagctgcagatgggcagaatagagagaaaaagttttagttatgctaaacgcagctttttcgatgattatctcaatatatccatcagctgccactgctgtaaggtctattaacgagcagcatgaacaactttagagtttgttgagaaattcccttgatagcatttctttaatacattgttgaggtgaatgcatgagacacacacttaaacatatgaagatgatttaagtagacttcagcaacgatttaagaataataaaaataagcagaacatctgtgccattttataagtcatgtagatgatagaattgcgactttgaggcaataaaagagttcctgcagattttgcctgttaaaaatatcaacgtctttttaaaaacctattttgatgtggcttgccagacagacttttaatatactggtttcattttatacacacgagggttgtgtggaccgaagtgttagttgctatgaactacaggtgctcaactgcaattttaatagtcaacaatcatttggagttcgtcaacaaaatataatagctactttttagcatccatccccagaacaactgattaaattagtgtttgtgaaatatccaccatggagatgttttagtaaaaataaaatggccagatttgagccaatgcaaaataactgtaaatgtacctggacatcttatagaacaaagttaaaagaaaaaactctcctccattgacagtggtagaagaagagaatgaaacattgagataataagatggaaatttctctatcgacagtggtagagtcagggaatgaagtgttgagggagtaagatggaaacttccctgttgacagtggtagaataagagaatgaaacgttgagggaataagatgataatttccctaacccatggcaacagaccattaaataggtttctcaatgaaatgctgttagactttatgagttgaccatctgaacatccaaccacaacaatgatagctcattggggaaaacagcttggcgttggcagaggagggaatagtaacacataagccagcttccctttttacaatcttgtaatttatcggacacatttcttgtgtaatggaagtaagaaaaagggaagaggtgctaaagcccattagttttgtttatttatttatttacttaactttaagttccaagatacatgtgcagagtgtacaagtttgttacataggtatatgtgtgccctggtggtttgctgcacctattgacctatcctctatgttccctcccctcaacccccaccccccagcaggccctggtgtgcgttgttcccctccctgtgcccatgtgttctcaatgttcaactcccatttatgagtgagaacatgcagcgtttggttttctctttcccttgttagttcgctgaggatgatggcttccagcttcatctatatctctggaaaggacacgatttccttcctttttatggctgcatagtattccatggtgtatatgtaccacattttcttgggcatatgggttggttccatgtctgctaaagcccatttgaatcctgggggaaggtgcgtgtgatatttgcagaacagaaagtggggctttaactgtaacttctttttcctccacccttggtgtgcaaaatggctctgtctaggaattgttttttatacatgaaccattttaacacatggtctaacttgctgggattagccacctcatctctcaaacccagcaccttggcaggtcccatgctgggggtaccatcagccaggccttggtggagccctctaaaaagcttggggttgatgcagaatgtatatattttatatatattatctttataatatatataatatataatgtaaatatacatattatataatatataatatatgtatactatattatatattatatatattatatataataataatatatattatatatattatatataataataatatatattatatatattatatataataataatatatattatatatattatatataataataatatatattacatatattatatataataataatatatattacatatattatatataataataatatatattacatatattatatataataataatatatattatatatattatatataataataatatatattatatatacataatatatagtaataatatatataatgtaaatatacatgttatatataatataatatgtatattatatatattaattatatattatatataattctattatatattatatatataattatataattatatacattatatatattattatatattatatataataattatatattatatatattatgtatataatatataatatataatatatgtataatatataatatattatgtataatatattatattatattatgtataacatattatgtataatataatatattatataatatataatatatattatacacaatatatattatacattatatatatcatgtataatatatattatacatgatatataatatatatctattatacataatatatatctatttgcggtgcttcttgcacagcaggtttgtgtgtttgtgttgtgtgttgggaagggggatatcaggctggaaatgagggtggagacagtccctgcatgcaccctccccaaagaggtgatttgtttaatggcttgagacttacagcaccaacaagactattacttctgaagttgtttgcatctcatttacagtttctgggatgcttttcttcccgttcatttttaaactgaagtactttgtaagtgcaaaacataactaacctctaaattacaacaccatttctgatggtttcattttaaacaactcacgataaagattgactttaacgtaggaataaaacagacataccaacatgttaaagtttctttttcctattgctgccagtaatatctagagatagttttctgtaatattaaaaagaaaagaaaaagtttaaaaccctagagaatcacttcactgcatcaacatctattacttccatctggtttaatttgtaacaggaactaatatactacttgaaaaaaatcactaataatatcataatagcattgtttcagaaaaatcaatctcaaattaggtaatgagtctggcatcttgcattttgttggggaaaaaactgaaacaagagcaatgtctaacagataaaactcagagattgatttgtgttttaacagtctggagaaaatataagactctcaaggaatgaggaattgttggccaagtgctaatgaaaccttctattcccacacagctgtttttagggttctttgtcagcattgctgtttcctgcttggacaaactaaaagcgtttctgaaaattgctttccaaatattttttttcaggaaccaacaacatagcatccacctagagatggatttacagactcttaagtatttttttccctctattaaaagactggttttgatgatgcctttctgcaacttcaacaatgcccatacttgcctattttattttaagttctgccttgtgatattaaccggaaccgaagacataattttgcaaatattgtctgccataaacatttcacagagttggttatacattcagtgattgccaatcaataggcgatgaagatagtctggaatgtaagccaaggggctaataagccatagaactgcactttatgcagggtcatcccagtctccagttagattctgttccctgagtgtcgtgctaatttcccagactctgctgatttttagaaggatgcaagaaggggacatgtatacccttgggttctgagagggggtactcaagtgattccctgggcttctgtatgttccagaatatccgccccattctcacatctggcacccttggcatctgcatctgcaagctctctaatgccccttaaaaacaagcaggggggtccgggcacggtggctcatgcctgtaatcccagcactttgggaggctgaggcgggtggatcacgaggtcaggagatcgagaccatcctggctaacacggtgaaagcccgtctctactaaaaaattcaaaaacattaactgggcgtggtggtgggctcctgtagtcccatctacttgggaggctgaggcaggagaatggcgtgaacctgggaggcagagcttgcagtgagccaagatcgcgccactgcactccagcttgggtgacagagcgagacgccatctcaaaaaacaaaaaaataaaacaacaacaacaacaacaaaacaagcaggggcaagatgacagggtcaggcaggtttctgagctgatgtggagcccgtcccagactttgggtgccttcctgaaaggggaatttattcagatgtgaagggaaatcaaccagtattatcctttgttcctattttcccttcttctccaccttgatagttgtgatcaaaattctcaggttaaatttgacattcagctatccatggctttagtatgagccattctgtttttctcaatatctatctatctatctatctatctatctatctatctatctatctaactatctatctattatctatagtctgcctattacttgtctacctacctatcatctatctctatcatcaatcaacaaatctatctctctacctgtctatatctatctacctacctatctatgtatctatctatcatctatctgtcatgcatctgcctatcacctatctacctacctatcatcatcaatcagccaatctatctctctacctacctatcatctatctatcaatctatctatgtatcatctgtctgcctatcacctacctatcattgatctctatcattatctattgatgtatctattctatctatctatctgtctatcatctattaatctacctatctattctctatcatctatttatcaataatctatctacctacctatcatctctatcaatcaatctatctctatcatgtattctatctatctacctatcatctatcatctatctatcacctatgtacctgtcatctatctttatcatctgtctagctatatattatctatctatctatgtacctatctatcatctgtctggctgtctatctatctatctatctatctgtctatctatctatctatttatcatctgtctgcctatctatctatctatcatctatctatgacaatagttatcaacaatggatgagtttgcccctggaaaacatttggcaacatctggagacctttttggtgaccacaactatggaaggagaacatatcacacccttgaagtaaaatgtgctgaggaacatccagctgtttctgacccatttcagagacagagcctcagagccctatctcctctgtctgaagatctgcctccttcttctgggctccgttcaggtgatattatttactcccagggctctattccattggtcggttggccagtctcccctgaacgtgcatcatgggtctccatcttggtcttgagccctattctccccttagattcttacaaaattctcaaacatcccatggcaaatacagctttgaattctttccccaacacctgtctctcccagcctttgctgtccagcaaatgatagaatccacccacttactcccctccaagtagaagtccttcccccaagtttgtcctcattcccactcccaccactcagcaatgcctgctggctcttcctctaaatacattcggaaatgttctgtgtgccttcatgcttactgccacacctggtcatggatccaacatccctcaatatctctgcaggattcacctcatttctgcctccctcccttgcccagctctgacacgttctccaggaagtggccaacattgctgttttaacacatacttcagttcatggatgaatagatatataattgatatatagattataacagatagatgcttgatagatgataggatgatagatggattgatagagaggattatagatagattgatggatgataggtaggtatagggtaggtagatagatagatagatagatacagacagagggacagatagacaaatttgcacgtgctaaggcaaagttaccaaatttctgcaatcttgatgtttaggactgaatcaatgtgggttgtaggggccatcgtgtgcattacaggatgttgagcatcatctctatagagaacaaatcaatggccgtgccataaagtgggcaagcttggtgagtctaaggaacagaaagatggccaataactctgaactttatggccaacagcaaaataccagagagctaactagttgtccaccacggaatattcttctaaaatgatgaggccatgcccaaacgtccctttgtttcttaagccctacttcaaatctcagctccccagagagccctgccgtagacatcggccaaccaaaccccttctactctccttcctgtgctttaattatttccttatgaaatttacaactatctgaaatgatctttttcattatttttacctttctagtcatgcttcttgctaagagagctgagcccttgcctatttggttgacccacccagaatagtaacttgcagacacacaaagctcaaattatagctgtgactgcgttgcagaatgaatccatgcatgtagaatctgtagcagacatcgtttcatattgagcgaagttcaaacagcacctgccttattttccttttgatttctccatctctaaaagcattagaacttgttttcagagcccactacatcctgaaggcacatacgaagctgatctgtacaaagtttttgcaattttttaaagtaaaattcaaatgacatggcattcacccttgtagcctctacaattcagtgccatttagtacattcaaactattgtgtatccatcatctctatcttgttccaaacattttcaccaccccaaaaggagacctcatatccatgaagcagtcattctctactccctctcctcctccagcctttgggaaccactgctttgttttctgtccctatgaatttgactattctgaacatttcatatacatagaatcatacaatagatcagcggtccccagcctttttggcaccagggaccagttttcatggaagacaatttttccacagacaggattgtggagggagtagttttgggatgactcaagcatatcacatttttgtgcactttatttctattattattacattgtaataatataatgaaataattctacaactcaccataatgtagaatcagtgggagccctgagcttattttccttcaactagacagttccatctgggggtgacaggagacagtgacagatcatcaggcattagattctcataaggagtgcgcaacctagatcccttgcacacacagttcagaataggatttgtgctccaatgagaatctaatgccgtcactcatctgacaggaagtggagctcaggcagtaatgccagcaatggggaatggctgtaaatacagatgaaactttgctggctcacccaccactcacctcctgctgtgcagcttggttcctaactggtccggtactgctctgtggcctggggtttgaggaccactgcagtacgtgacctgtagggcttcttgcagtgaacaacatggttcaagggtcacccacatggtagcctgtgtcagagcttcattcctttttgtagtgtgcatcttgagcaatgattactgccactgcatagtgattttgcagaaaatcaatttaaagagtgaatgagaatatgtgccatgtagacttctactctgtcgtcggcatttctgaaatgtacatttagactctctttgcttctcactcacgtgcattgcatttttcctcatggctgttatttcagtcaaacaaaaacctctgaacaattctgaggatgccatccgcaaacataccctgtaagaccttcttggccctctcttgtgtgctaaatcatctgtgcttgtgtttaaataagaagaaataaggtattcttttaaaaataaaaatggcggccaggcgcagtgactcacgcccgtaatcccagcactttgggaggccgaggcgggcagatcacctgaggtcaggagtttgagaccagcctggccaacatggtgaaaccctgtctctactaaaaatacaaaaattagccaggcggggtagcacacgcctgtagtcccagctactcgggaggctgaggccagagaattgcttgaatccgggaggcagaggttgcagtgagccgagatggcgccactgcacttcagcctgggcgacagagggagactctatctcaaatgaataaataagtaaaataaaaataaaaaaataaaaaataaaaaatggcaacttagtatggtcattatccatgattgacacttcatttacccacaagatgggaacttaaaaaccctgcaaacacagcaacaacaacaataatgtccccattatagaggagaggagactctgaacgacgctgaatgcatccaagaatacacagtcactatggtaaaacacaaggatcttgagaccaaagctttaccttgcattcagggacgattaactgaggcgggagaggctatcaatatctacttgacactttattttatttagtgagttgaaacatatggaatcagggtgcaaagttcctggaaagataacgtagcaaagaatgaattagaaatgtatcaggtagatttctactctggagtcagctgaaatcaggtctgaaattggtcatttgagtgtctctgagaagaatcattgaatggacatgtttacgaatattatgattcctgtatgatttttacattattcatattatgtataaatttttgaacatctgaatatgttttcattgaatgtctttattcatataacatattgctcattattcccctgcctaactacattttagttgccatttttaactcacgaattcttagcatgtctctttttgtgtcttgcttggctgtgactttccctttgatctccctggtatcagccttggtgtacctattccctccagaaactctgtagcagtccttgacacagagcaatgtctgagtggctacagacattatgtcctttaacccacacagggctctctgaaaaaagaatcctcagtagcattactaatgaagagtttgagcttccaaaaagcttggtaacttctctgggatagccagcgggcaacgtgaagtgtgcctgacctcaaaacatgaggcctagagggtgtggtggctgacatctgtaatcccagccctttgggaggccgaggcgggtagatcacttgagctcagaaggtcaagaccagctcgggcaacatggtgaaaccccatctctactaaaaatacaaaaattagccaggtgtggtggtgtgtgcttgtagtcacagctacttagaaggctgaagtaggaggatggcttgagcccaggacacagaggttgcagtgagccaagattgtgccaccacactctggcctggacaacagagccagaccctgtcttgagagagagagagagagacctttctatgcttctatctcacctctaaggatctcacgtctacacactgggacctcctttccccacccagcttgcagtagtcaacaccttccttcccctttattatactctgcaggaaactgctgagctcatgattggaaaaaatgcacctctttcttctcttacttggaattttacccactgaggaggttcatggtccttaacatgaaataaagcttcatgcccttgaatttcacttatctttgcagcattatatttcggggagttttgcaccatgattccatgaatttgaactcactaaataaaataatgtcaagtagatattgacagcttctcccacctcagttaacagtgtctgaatgcaggttgaagctttggtctcaagatacctggattttactctcactgactgtattcttgaatgcattcaatgtcttctgtgagtctcctcttctttgtaaaggggacattattgttgttgtcactgtgtttgcttgtggaatatttaagttcccatcttgttttaataagaccaaagtaccactaggtaataggaaaaaaactttggaatggaacattgcatggtttatcctcttttttcctattccttgaaaattttggaaagtttctttttttctttctttcttacttttttttttttttttttttttttttttttgatatggggtattgctctgttgcccaggctggagtacagtggcacaatcacagctctctgcagcctcaacctcctgggttcaagtggtcttccctgcttagcctcctgagtagctgggaccacaggcatgcaccatcacacccaactaatttttgtattttttgtagagattaggtctcactatgttgcccaggctggtcttgaactcctgggctcaagtgatcctctcgcctcaccctcccaaagtgctgggattataggcatgagctgccatgcccagcctggaaactttcttgaaactcagtttctgctgtggaaagttggcctgcttcatggggtttaggtgataaagggcaaaaagtaatacaaagaggacaaggctcaattccagctaagtttcccaccttctatggaatccaaagcatgttcataaggtacacacatagctatgagcccaattcttttaatattttacctctcaccagtgttaaataaagcagagcttagctgacaagacactggagtaatgcactaaaaagaagagtgaaaaatatcatgtaatcaagaagagagaaccactatatatgattgttcattgactacatgagtcaaaatgatgaacaggaaataggatcatcttctactatattttccccatacaccatattgaatctatacaacattatttcaataaggtgggatgcatttaattccatctgatgttttctttgcataaatttatcttaaaaagaagaatgtggccgggcgcggtggctcacgcctgtaatcccagcactttgggaggccgagtggggcggatcaggaggtcaggagatcgagaccatcctggctaacacgatgaaaccccatctctactaaaaatacaaaaaattagccgggcgcggtggcgggcgcctgtggtcccagctactcgggaggctgaggcaggagaatggcgtgaacctgggaggcggagcttacagtgagccgagatgggccactgcactccagactgggcgacagagcgagactccgtctcaaaaaaaaaaaaagaagaagaatgcaattatgaaaggaggtctttgaaaagtttgatgcaatcaaggtgaatggtttttgagggtagagcttataaatttcctgcactcaaaaatttgtagctgaaaggtgcttcctaaggctgggtcttaggggagtcacacctaacctggtgtttctgttgactttggaattgtagtccaggtttgagcacatatgagtatgagaaaattggaccatgctagtatctgctgcatttagctatgagctgttcacttatgttccctgctaattgatttccttttatgtaagtgataagaagaagcaatcagtgatatcaggctagatgtgttatgtctcagcagaaacagtgatttatggtaacagcgtgcaggcttctctattcctttttcaaattgcttatccagggatcaagtttaagcattgttgtatgctattaccaatatggcaatgagaaatttctaaattggtcaagaaagcatcttgacaattatatacacaacaacaaaaaaccaaaaatttaaaacaaaaagaacttatcttgaggacaggttacaggaagaaacaaaacaaacaagaaacctagcatgtctacgagtaactttgatcatccgtcagacatggcagcctgtccatgggaaataagagtgttggtgtctgtggtcaacatttctatttggcctttagcatggagctgtctcctttcttaccatatgcaaagcaaattccaatgccgtggattttcccggccctgctagccacgtgtccctctttattactgtcacttcagcacagagtttccaagaaagagacacgtggaacagcctcatgttgaattctaaatcctactgatggacacaccaaatagcctcctgaccacaacagcatattccaagtcaaagttctccatgaatgttccttagcagactgaagacaaataaatacatgtcactttcttcttgaccccagagatagggacacgaagggataaacgtctttgggaatggcacccctgtaacctcagaatcactacttcatgaccaggtgcagtgactcttgcttgtaatcccagcactttgggagcccaggcaggagggtcatatgaggccaggagttccagatcagcctgggcacatatgaagaccctgtctctacaaaaatgaaaaataaaaaattagccagggatagtggcctgtgcctgtagttccagctacttgggaggctgatgtgggaggattgctggagcctgggaggtggaggctgcactgagctacgattgcaccgctgcactccagcctgggtgacggagtaagattgtctctaataaataaataaatagacaaaaagactcaccattttactaatttgctcttgggcaggctagggaatgtttcccatatgggagttaagtattcgctatttattttcttaattattattattgttattattattattaccattctttaggtttaatagcatacaggccctgtcagaaacctcatttgcaggactgaccaagttggagctacttatgattcacggcaatgagatcccaagcatccccgatggagctttaagagacctcagctctcttcaggtaaacccacggcatttataagcgtcactaaattgcatcctctaagaccagtaataaagaatagaaattatgtcattctccttaatgatcaataaaacggctattgtttgacatgaaagacaagcttcatgtcattactctccagccctttgtactggtttctgtttgtggttgtggctttttaaactataaacaggatccttttgttttgttttgttttcccctgtccttgcaggttttcaagttcagctacaacaagctgagagtgatcacaggacagaccctccagggtctctctaacttaatgaggctgcacattgaccacaacaagatcgagtttatccaccctcaagctttcaacggcttaacgtctctgaggctactccatttggaaggaaatctcctccaccagctgcaccccagcaccttctccacgttcacatttttggattatttcagactctccaccataaggcacctctacttagcagagaacatggttagaactcttcctgccagcatgcttcggaacatgccgcttctggagaatctttacttgcagggaaatccgtggacctgcgattgtgagatgagatggtttttggaatgggatgcaaaatccagaggtaagaagagaggagagcagaccactcctagctgcacattcttttatctttttggagacgttccattctccaaggttcttatattgacttattcaatgaaatctgagcttcgatgaaatctgagcacccaatcagctagacaggaactcagactttaaacgttaccacttaaatgttaagacatctccattccccaacgcaaaggcagttatcccttagtgaaatgtagtgctcatgtaatcagttacatacaggtgatgtgggttgccatggaatgggtatctggaggatcatgccagccttggactgcagcttaatgtgggaaactgggactgggaaggggctgtgaatccatgttccatgagaaattcacaaaggatgcttggaaaagagcaggctggtgagaggagtggctacaaggtcattattttacggacacggaagcgattctcactattgatctagagagctatgacaacaaccaggacttatgtgttgcagttgcaacaaagtagattgtgattcctttctgccttccttccttctctccccttccttcatcttccttccttccctccttccttccttccctccttccttccttttctctccttccttccttccttcttctctccttccttccctccttctttccttccctccttctttcctttcttccttctctccttccttccttcttttttccttccttccttccttcttttttccttgcttccttccttctctccttccttccctgcttcccaccttccctcctttactccttcctgctctccttccttccctccttctcaccttccttctttcattttttccttccttccttccttccttccttccttctctccttccttctctggttcccaccttccctcctttactccttccttgtctccttccttcattccctcctcctctccttccttccttccttcgttctctccttccttccttctttccttccttccttcattccctccttccctccctgcttcccaccttccctccctcgctccttctttccttccttcgttccttccttccttccctccctcgctccttccttcgtttccttccttccctccctcccttccttcattccttccttcttccttccttcctcctgccttctctcctgccttcctttcttccttctgtccttcctttcatccctctcttccttcctccattcctccccccttcactctccctccctccctatcttcccttccttccttcctttctcccccttctctaagccctaccttgcaacctatccccatccttagattgcattgtgtttaccatatcctggatctatttcctcaactccatcctcacagctgctggcctggatcaagctcctttcctctctctggtagaaagggggagcattctaaacaagtgtccccatgtccttgtcagccctgttttccattcactctctacaaagcagtgagaacatttttacaggatgtgcacccattcaggccacacctctgcgtaactgatttccattgcttttaggataagatacacatttgcacattccctccaagaagtctccacacaatggtcgctccacctgtccccactatcctctagcatggtggtcccattgctcttcttattcgtttatttctagccacacagtcttcccgtctgttccttgcagcttctaaacttatttccaactcaacatcattggatttgctcagttgcctacttgggagtctttactgctagacattcaagaggcttgctttttcttagcttttagagcttcattccaagaggccatcaagcaatggatgtgggaaagacagaggtacacccacttgtgaatggtcttaaccagaaaagacacacgcctcctccactcatatttcattggtgggaaccagtcctcacaccccagtggatgtaagggggcctgaaaatgcatttggatggctattttgtagcagcaacactatattatggatgtggacccacaaaactttgctgggcaaagaaccatctctgctactgtctggagatacgcatgcatgtctttgtgtgtgcatgtctatgcatgtatttgtgcacatgtgtgtacatctgtgtatgtgtagatttgcatgtatgtgaaagaaactcaagattgtaaagtattaaggttagttttatatagtgagcatttctgaagattgcaatcccaggatctttcagagagtttctgttagactgctgcatagcaaggtttcagcccacagcttatacacagatggtggagtttctgcaggtgctcagaagtcacaccaaatgtggtcagaattcacatcagttgtgctcagaagttatattagagctgattctcatcaaagtttgggtgccaggggacatctggttatagattacagaggcatagtccttaatcctgccagacattatcttatgtgtagaaagaggcaggggctaggagcattgaactcatcttttctaaaagtgcagtgattcaggcaagagacatgtggacctgtgctccatcctgctcatcatcttcagggcattcatgtagaggctgcgctcattcgctgagccatgaaattcagctggccaagggattttgtgaaatgctcctgcttgtgcttgctgccttgtctcacagcatgtatgtgtgtgggtatgagtgtgagtgtgagtatgtgtatgtgtgttggggggagatgtgcaaaacaatcctattcgcatgttgaggtgtttgctttgaaagtcacacagaaaaccatggtcaggagggcaaaaggaaagatggcaaagccagttaggagctttataattctccaagtcatagatgaagcagtatgactggcttcttcccaatgggaacgggcagaagtaggcagaggactgccatgaaaaactcctagtcttccagtttccccaggcagagagagtatggcatcacttactgagatagaacaggcacgagattctacatttaggtcagggagagaatataaatttgtttcatagatgtcagtttgaggactcttcttgctatctaaatagacatgtcaaagaggcaatggggtgtggaactcacggaatgtgtttggactagagaagcacatatggtagtcatcactggcgggtggatggtaattggaaccacacatatgcgagaggccattgacgctgaagccgaccagaaaggaaaggggcttaggctcaagtcaaggaggacccagtcagcaaagattcaggcagaggaggaggaggaagcagtgactgagacccagttgtggccagaaaggacggagaaaattccagaggatttcatatccaggagaccaagaggacaacgtgaactcaaaagcaaacactctgtgaagtgtttactacaaatatagagagagttataaatatagatatagttacctagatacatacgtattgattatatatacattatatattataaatgtataaatatagttataaatatagatatagttacctagatacatacatattgattatatataaattatatattacaaatttataaatatgcagagagttataaatatatagtccctagatacatattgattatatataaattatatattacaaattataaatatacagagttataaatatatagttcctagatagatacatattgattatatacaaattatatattataaatgtataaatatatagagagttataaatatagatatagttacccagatacatacatattgactatatatatttatatataaatatataaattatatattataacttataattataaattatatattataaattataattataaattatatattacatataatttatatatataaatatatataaatgtatttatgtataaatatatataaatatatataaatgtatttatgtataaatatatataaatatatttatatataaatttatatataaaatacatataaatatatataatatataatatataaattatatattataaatttataattataaattatatattataaattacaattataaattatatattataaatttatgatttaaaattatacattataaattataattataaattatatattataaattataattataaattatttatgaataaatatattattatatatttatttataaatatatgtacatctataaatttatatattgttatatcatgacttaaaaaagtaaatatgatgtgatacatgccaaagattcttccttttacctgaaaatactttcaaggggtttatatatttatatccatatttaatttacatattatttatatatacttagatataaatatacattgattatatgtcaatatatctacatattaatatatatttattaatatatcaatatatgtttatatatcatgatagatatatattatataaatatatatgtattatatatctatatgttatctatctatatatctattaagatagatacatatttgtatatattgagatagatatctatcaagattttttaatatatattggtatatatatcaagatgaaaaacaacaaaaattagatatgatgtgatacgtgcaaagattcatccttttaccaagaaatgcttccccagtttgcagtatatttatatagattctcctaaactttcacagaagttacattgtaaaatgtatgtgaatgaagttgttttctttaacttagaaatgttttttaaatacccgttagtaagtattttaagacatttttaagtaaaaattattattaatggttaagcagttataaagcacccgttagttaccacacagtgtgctaaaactgtggtttaacatgaagcctcaaaggcaactcatgtataggattccttgtttatgggattacagctgggtgataaagatgcaaacataggctttatcctctggccatgtgcaaggcatgccattctttggctccttaccctattgtctatttgcttatttgttttaggaattctgaagtgtaaaaaggacaaagcttatgaaggcggtcagttgtgtgcaatgtgcttcagtccaaagaagttgtacaaacatgagatacacaagctgaaggacatgacttgtctgaagccttcaatagagtcccctctgagacagaacaggagcaggagtattgaggaggagcaagaacaggaagaggatggtggcagccagctcatcctggagaaattccaactgccccagtggagcatctctttgaatatgaccgacgagcacgggaacatggtgaacttggtctgtgacatcaagaaaccaatggatgtgtacaagattcacttgaaccaaacggatcctccagatattgacataaatgcaacagttgccttggactttgagtgtccaatgacccgagaaaactatgaaaagctatggaaattgatagcatactacagtgaagttcccgtgaagctacacagagagctcatgctcagcaaagaccccagagtcagctaccagtacaggcaggatgctgatgaggaagctctttactacacaggtgtgagagcccagattcttgcagaaccagaatgggtcatgcagccatccatagatatccagctgaaccgacgtcagagtacggccaagaaggtgctactttcctactacacccagtattctcaaacaatatccaccaaagatacaaggcaggctcggggcagaagctgggtaatgattgagcctagtggagctgtgcaaagagatcagactgtcctggaagggggtccatgccagttgagctgcaacgtgaaagcttctgagagtccatctatcttctgggtgcttccagatggctccatcctgaaagcgcccatggatgacccagacagcaagttctccattctcagcagtggctggctgaggatcaagtccatggagccatctgactcaggcttgtaccagtgcattgctcaagtgagggatgaaatggaccgcatggtatatagggtacttgtgcagtctccctccactcagccagccgagaaagacacagtgacaattggcaagaacccaggggagtcggtgacattgccttgcaatgctttagcaatacccgaagcccaccttagctggattcttccaaacagaaggataattaatgatttggctaacacatcacatgtatacatgttgccaaatggaactctttccatcccaaaggtccaagtcagtgacagtggttactacagatgtgtggctgtcaaccagcaaggggcagaccattttacggtgggaatcacagtgaccaagaaagggtctggcttgccatccaaaagaggcagacgcccaggtgcaaaggctctttccagagtcagagaagacatcgtggaggatgaagggggctcgggcatgggagatgaagagaacacttcaaggagacttctgcatccaaaggaccaagaggtgttcctcaaaacaaaggatgatgccatcaatggagacaagaaagccaagaaagggagaagaaagctgaaactctggaagcattcggaaaaagaaccagagaccaatgttgcagaaggtcgcagagtgtttgaatctagacgaaggataaacatggcaaacaaacagattaatccggagcgctgggctgatattttagccaaagtccgtgggaaaaatctccctaagggcacagaagtacccccattgattaaaaccacaagtcctccatccttgagtctagaagtcacaccaccttttcctgctatttctcccccctcagcatctcctgtgcagacagtaaccagtgctgaagaatcctcagcagatgtacctctacttggtgaagaagagcacgttttgggtaccatttcctcagccagcatggggctagaacacaaccacaatggagttattcttgttgaacctgaagtaacaagcacacctctggaggaagttgttgatgacctttccgagaagactgaggagataacttccactgaaggagacctgaaggggacagcagcccctacacttatatctgagccttatgaaccatctcctactctgcacacattagacacagtctatgaaaagcccacccatgaagagacggcaacagagggttggtctgcagcagatgttggatcgtcaccagagcccacatccagtgagtatgagcctccattggatgctgtctccttggctgagtctgagcccatgcaatactttgacccagatttggagactaagtcacaaccagatgaggataagatgaaagaagacacctttgcacaccttactccaacccccaccatctgggttaatgactccagtacatcacagttatttgaggattctactataggggaaccaggtgtcccaggccaatcacatctacaaggactgacagacaacatccaccttgtgaaaagtagtctaagcactcaagacaccttactgattaaaaagggtatgaaagagatgtctcagacactacagggaggaaatatgctagagggagaccccacacactccagaagttctgagagtgagggccaagagagcaaatccatcactttgcctgactccacactgggtataatgagcagtatgtctccagttaagaagcctgcggaaaccacagttggtaccctcctagacaaagacaccacaacagcaacaacaacaccaaggcaaaaagttgctccgtcatccaccatgagcactcacccttctcgaaggagacccaacgggagaaggagattacgccccaacaaattccgccaccggcacaagcaaaccccacccacaacttttgccccatcagagactttttctactcaaccaactcaagcacctgacattaagatttcaagtcaagtggagagttctctggttcctacagcttgggtggataacacagttaatacccccaaacagttggaaatggagaagaatgcagaacccacatccaagggaacaccacggagaaaacacgggaagaggccaaacaaacatcgatataccccttctacagtgagctcaagagcgtccggatccaagcccagcccttctccagaaaataaacatagaaacattgttactcccagttcagaaactatacttttgcctagaactgtttctctgaaaactgagggcccttatgattccttagattacatgacaaccaccagaaaaatatattcatcttaccctaaagtccaagagacacttccagtcacatataaacccacatcagatggaaaagaaattaaggatgatgttgccacaaatgttgacaaacataaaagtgacattttagtcactggtgaatcaattactaatgccataccaacttctcgctccttggtctccactatgggagaatttaaggaagaatcctctcctgtaggctttccaggaactccaacctggaatccctcaaggacggcccagcctgggaggctacagacaggcatacctgttaccacttctggggaaaatcttacagaccctccccttcttaaagagcttgaggatgtggatttcacttccgagtttttgtcctctttgacagtctccacaccatttcaccaggaagaagctggttcttccacaactctctcaagcataaaagtggaggtggcttcaagtcaggcagaaaccaccacccttgatcaagatcatcttgaaaccactgtggctattctcctttctgaaactagaccacagaatcacacccctactgctgcccggatgaaggagccagcatcctcgtccccatccacaattctcatgtctttgggacaaaccaccaccactaagccagcacttcccagtccaagaatatctcaagcatctagagattccaaggaaaatgttttcttgaattatgtggggaatccagaaacagaagcaaccccagtgaacaatgaaggaacacagcatatgtcagggccaaatgaattatcaacaccctcttccgaccaggatgcatttaacttgtctacaaagctggaattggaaaagcaagtatttggtagtaggagtctaccacgtggcccagatagccaacgccaggatggaagagttcatgcttctcatcaactaaccagagtccctgccaaacccatcctaccaacagcaacagtgaggctgcctgaaatgtccacacaaagcgcttccagatactttgtaacttcccagtcacctcgtcactggaccaacaaaccggaaataactacatatccttctggggctttgccagagaacaaacagtttacaactccaagattatcaagtacaacaattcctctcccattgcacatgtccaaacccagcattcctagtaagtttactgaccgaagaactgaccaattcaatggctactccaaagtgtttggaaataacaacatccctgaggcaagaaacccagttggaaagcctcccagtccaagaattcctcattattccaatggaagactccctttctttaccaacaagactctttcttttccacagttgggagtcacccggagaccccagatacccacttctcctgccccagtaatgagagagagaaaagttattccaggttcctacaacaggatacattcccatagcaccttccatctggactttggccctccggcacctccgttgttgcacactccgcagaccacgggatcaccctcaactaacttacagaatatccctatggtctcttccacccagagttctatctcctttataacatcttctgtccagtcctcaggaagcttccaccagagcagctcaaagttctttgcaggaggacctcctgcatccaaattctggtctcttggggaaaagccacaaatcctcaccaagtccccacagactgtgtccgtcaccgctgagacagacactgtgttcccctgtgaggcaacaggaaaaccaaagcctttcgttacttggacaaaggtttccacaggtaagatgtttaagcatctactttttttttttttggtcaatttttattttattggctagcaatataatacattaaaacagtatatggtgaacaacataaacacattaggagaaatttttataacacatttggggaaattttttactcgaataagtgtttatttttatttttataacttcagcttttattttagacacagggggaacatgtgcaggcttgtcacacgggtatattgtgtgatgctgaggtctggggcacaaatgatcccattacccaggtagccagcgtagcatccaataggtacatttttcaacccttgccacccctccctctctcctctactagtcccaagtgtctatttgtcctatctttatgtccatatgtacccaatctacacttcaaccagagtttgtgtaggagaaagttactggagtcttactttaggattaatttacctttcttatggactcaagggcctctctgggcaggggtggctggccactgcaagcctgggatgcccatgcagccagctagcccgaggagttcaggagaacagcatgagcataaataaataagggagaggctgtgtctctagtaattgagcttgtggcatcttagctcaccttggaagtggctgggactcatgcctgcttccagaattctctattaaacccacatttgctgtcctttgcctgaagatggccctgtttctgggattagtgtaaagatgaaaaagagaaacaaaacattctttttctctatcctttttttacagcatacttatttcgtatgtgtgtgatgacaacacaaaatctactctcaacaattttcaagtataagctaaattgttattaactatagttgccatgagtataatatcacttaagcatattcctcctaactgaacttcatactctttaattaatatcttccctttactcccatccccagcccctggtaaccaccattccactatctgcttcagcttctatgagttcaactttcttacgctgcacatataagtgagatcatgcagtgtttgtctgtctgtgcctggtttatttcacttaatctaatgtcctccaggttcatttatgttgtggcaaatgacagaatttcgttttttgtttgttttttttttaaagaaaaagaaaagacagaatggcatttcattgtgcatatataccacattccctttatccattcattcattgatggacacttagctgaattccatatcttggctattgtgaatagcactgtggtaaacatgggagtgcagatgtcttgtcaacatactgacgtcatttcctttggataaatacccagtagtgggattgctagaccataggcagctctattgttagttttatgaggaatctccatactgttttccacagtggttgtaccaaattacattcccaccaacagtgtacgagggtgcccttttctccacatcttcaccagtgtctgtgtttttggtctttttgataataaccattccagcaggcatgagatgatatctcagttttacatttctttcatggttaggaccaaaacaggctgggtgtggtggctcacacttgtaatcctagcactgtgggtagccaagacaagagaatcacttgaggtcaggagttcaagaccagcctgggcaacacagcaagaccatgtctctacaaaaaacaaaaatttaaattatccaggagtggtggcctgcacctgtagccccagctacttagaaggctgagtccaggaggttgagactgcagtgagctatgattgtaccactgcactctcgcctgggagacagcaagaccctatctctaacgaataaaataaatataaaaaaaacttttaaaaacactaaaacattctacctactacatttgcttttgctgcctgggtgttaaagtggagaattagattaactaatactgctcgtttgagcattatcaaaagggcacagtttatgccaaagctgactgtgttaattttctccaggagctcttatgactccgaataccaggatacaacggtttgaggttctcaagaacggtaccttagtgatacggaaggttcaagtacaagatcgaggccagtatatgtgcaccgccagcaacctgcacggcctggacaggatggtggtcttgctttcggtcaccgtgcagcaacctcaaatcctagcctcccactaccaggacgtcactgtctacctgggagacaccattgcaatggagtgtctggccaaagggaccccagccccccaaatttcctggatcttccctgacaggagggtgtggcaaactgtgtcccccgtggagggccgcatcaccctgcacgaaaaccggaccctttccatcaaggaggcgtccttctcagacagaggcgtctataagtgcgtggccagcaatgcagccggggcggacagcctggccatccgcctgcacgtggcggcactgccccccgttatccaccaggagaagctggagaacatctcgctgcccccggggctcagcattcacattcactgcactgccaaggctgcgcccctgcccagcgtgcgctgggtgctcggggacggtacccagatccgcccctcgcagttcctccacgggaacttgtttgttttccccaacgggacgctctacatccgcaacctcgcgcccaaggacagcgggcgctatgagtgcgtggccgccaacctggtaggctccgcgcgcaggacggtgcagctgaacgtgcagcgtgcagcagccaacgcgcgcatcacgggcacctccccgcggaggacggacgtcaggtacggaggaaccctcaagctggactgcagcgcctcgggggacccctggccgcgcatcctctggaggctgccgtccaagaggatgatcgacgcgctcttcaggtaggcagctctgcgtggcttcctgtaaatcgctgggctggtggccccaacgaatatgagtcctttttcaggatgaatatgcacacacgttgctccctgcgtccgataaaattaaatgaaattaattagcagggcacggtggctcacgcctgtaatcccagcactttgggaggacgaggcgggcggatcacttgaggtcaggagttcgagaccagcctggccgacatggtgaaacactgtctctaataaacatacaaaaatttgcgggcattgtggcgagcgtctgtagtcccagctactctggaggctgaggcaggagaattgcttgaacccgggaggtggaggttgcagtgagccaagatcatgccacttcactccaccctggacgacagagtgacattccatctcaaataataataataataaattcattagagacagggtgtcactctgttgcccaggctggagtgcagtggtgcgatcatagctcactgcagcctcaaacttctgggttcaagcgatcgtccagcctcagcctcctgaagtagctgggactacaggtgtgcaccatgaggcacggcttgttattattattattattattaactttttgtagagatgggttctgctgtgttcccaaggatgatctcgaacacttcacctcaagcaatcttcccgccctgacctcccaaagtgctgggatgacaggcttgagctcctgtgcctggcccggtgtgtgatttatttatttatttatttatttatttatttatttatttatttatttttgagacggaatctcgctctgtggcccaggctggagtgcagtggcactatcttggctcactgcaagctccgcctcccgggttcacgccattctcctgcctcagcctcccgtgtagctgggactacaggcgcccgccaccacgcctggctaattttttgtatttttagtagagacggggtttcaccgtgttagccaggatggtctcgatctcctgacctcctgatccgccgcgcccggccccagtgtgtgctttttctgcaatgaaattttgtccctctaaactcggatccagaacaaatactcaacttcttaacaaatacttaacttcctcctctcttgccccataaaaaaaaaaaggaaaaaaggataaatgaaccaagaaattcttgttttaatgattatatgtttaactataatgttaggacaaacaattcagcttgcctctatttccattattgatttcaacaaaatacatagacgtgttaggctttattttaatatgacattattgatagagtcaaagtgtatacattgttttaaaagcatcattaccacaccaacatagtgcacttgaaatgataaaaatgtacttgggctatgaagaaagccaagccaccttctaatcaagtgccatctgttcccagatatacaggtttatggcagtgcttttcaaccaagggtgattttgccccaagacaacacttggcaatatctgaagacacctttgattatcacaaatggggcagtgggtgcttctggtatctggtgggtggaggccagggacggtgctcaacaccctgcagtgcacaggatggcccatcacagattgtcatccatcctaccttcaatgtccatagtgccaaggtcaggtaactctgtcttagcatgaaaggttctatctatctatctatctatctatctatcatctatctatctatctattctatctatctatctatctatctatcatctatctatctatatctatctatctatcatctgtctgtctttctgtctatccatccatcatctatggcagtggtttgcaaccaggcatcaggtgttccttagtccccaagggacagttggtgatgtatggagacattttaggtcatgatgactctggggtggagggtgtgcttctggtatatggtggctgcagccccgggatgctgctcaacaccctacagtgcacaggacaccccaccccagattagcattcatcttgccttaaatgttactacggctgaggtcaagtaaccctgtcttagcatgtaagattttgcctatccatttacctatctatttatccattcattcattcctgtatacttaacctatccatccatctttatctcttatgtatctattcattcatgcatccacccatatctatctatctatctatctatctatctatctatctatctatctgcctacctacctgtctatggcagttgtttacaaccaaggagattttattccaaggagatatttggctatgtctggcaacatttttttggttgtcacaaatgggatgaatgttactggcatctggtgggtggagcccggagatgctgctcaacaccctacagtgcacaggacagacccaccacagagaatcctccatccagccttaaatgtccctagtactgaagccaagaaaccctatcttagtatgaaaatgttggtctatctatatacctgcttatccatccatccatgtctatctacctaacctatccatccattcattcttatctcttacgtatccatctattcatccatccatccatctatccatccatttatccatccgtatctatctgtctatctgtctactcatctatctagctagctagctatggcagttgtttgcaaccaaggagattttactcccaggagacatttggctgtgtctggcaacattttgtggttatcacagatgggatggatgctactggcacctggtgggtggagtccggggacactgctcaacaccctacagttcacaggatggccccatcacagagaatcttctagccccaaatgtccctagtgccaagattgagaaaccctgagctagatacaaaaaaagagctaatatctctttaataagcgtttcaaaaaatagaggacccagatagtagaggaaaggtaaaatggagtccaactaaattcacagtgcaatggtggagaacccctggattgtgctgtcttcagcactcagtagctcgagcaggaaagcctcttaccgtgggtccctccccagggtaggagcaaaatcagcgtccaaggttttcttctgcacagttgtgtctggcctcccaggactcttttcaattcaggaaaagggctgagatgccttttccctgcctgtattttatactttagatggctgggtggtgccctgaagagcttgcacaatcaatccagaagagccatgtacccaatttacccaggaatgccttccagcttagcagatgtgctgccacatagagaactgctttccattgaatttggcatggtggaggcaattttgaatggataacagtataagaatgcagttccagtaagatttttgggtcattccattaatgtctccatataaatcctaaataaattataaaccattatttctgtcacttcattcttagtaaattctgactatattcttagtaaagtgtaattgaacaaaccatgtgcattttgtcaaagagcaggctctgccctgctatttaaaaatacaaatattgagccaggcgcagtggctcacacctgtaatcccagcactttgggaggccgaggtgggtggattgcttgaggtcaggagttcaagaccagcctgaccaatatggtgaaaccccgtctctactcaaaatacaaaaattagcagggcgtggtggcctatgcctgtagacccagctactcggaaggctgaggcaggagaatcatttgaacctgggaggcggaggttgcagtgagcggagatcaggccgctgcactccagcctgggtgacagagcgagactccatctcaaaaaacaaaaacaaaaacaaatatcagagcttcgtttcttgaagctgaatctctcacgatgcacaggcatctgtggctttgagatttgctcagttgattctgatgacaactgggctaggggtcactgttaatggaagcctcagaatgtttacagacacatgctaccatactcatttttggattcaaattccaaggcacatttaaatgtccttgcctgtcccacacctgttaaattccttaccaagttacattgacttgattctcactcatggcccacaaaacagtgtatatggtcattgttaatcattgcttttattacaatgattaggttgaatgtaatcacaactgggcttattttaaaagatctatgacagtgtcttagacatgccattagaaaaatggagtcttgccaggtatggtggctcatgcctgtaatcccagcactttgggagaccaaggcagaaggatcacttaagtccaggagttcaaactcagtctggacaacatagcaagatcccttctctacaaaataaaaaataaaaaaaactccatccaggcatattggtgtattgttgtagtccaagctactcaggaggctgagatggaagtgtcccttgagtccaagagatcgagactacagttagctatgattgcaccactgcactccagcctgggtgacaaacaagatctcagttcttaaaaaaaaaaaaaaaaaagaaagtgtggtatttaggaaatattaaggctcccattataatgtatgtgtaattgagaattcaatagggacaactttaaaagtgagaactttctcaatcttttcactggattattcaacatattagttccgaataactaaaggatacttcagtatttataaaactcttacatacataatgaagattttcctatcatcctttctagtttgcctctgttaaacctttttgtaattattaactcggcagtgcttggacttcatggggaagaatgacacaccagccttgaggttttagctagtgagtgttattcagctttaattacaaattctagaaaacctgttacaccaatagggccagcttctgaagatcccaattttagccttaaaactcaccttgaaactctgggcataaccataattacatgaccttattagagttgcttttctgactcttgcccaaaactgggatacaacagctttaaaaaaagaaattgccaagagtagaaaccgtgtctaaagcattttctccaggaagaatttaacatctttataaggttgacccagattcttcaccatctccatgactgtagcattttatctgattttgttgttacaatgacctctgtaatgaccaccatgcaaatacttgatccacacacacttgcaggaatgggattgacgtctttgactacatttcatgtccttgaacccatggtcaggccagcctaacatcagattcaacagggagttcttatttgcagtcaatcactttccacaaccttctccaggctgtaaaaaccactgggcattctgcaatagcagccacctgagctgatgcatcacagaaacacctatttttgtgttattccagcgacctaatgccacactagagcatttgggaaactgacatcttactcctttttctttttttctgtagttttgatagcagaatcaaggtgtttgccaatgggaccctggtggtgaaatcagtgacggacaaagatgccggagattacctgtgcgtagctcgaaataaggttggtgatgactacgtggtgctcaaagtggatgtggtgatgaaaccggccaagattgaacacaaggaggagaacgaccacaaagtcttctacgggggtgacctgaaagtggactgtgtggccaccgggcttcccaatcccgagatctcctggagcctcccagacgggagtctggtgaactccttcatgcagtcggatgacagcggtggacgcaccaagcgctatgtcgtcttcaacaatgggacactctactttaacgaagtggggatgagggaggaaggagactacacctgctttgctgaaaatcaggtcgggaaggacgagatgagagtcagagtcaaggtggtgacagcgcccgccaccatccggaacaagacttacttggcggttcaggtgccctatggagacgtggtcactgtagcctgtgaggccaaaggagaacccatgcccaaggtgacttggttgtccccaaccaacaaggtgatccccacctcctctgagaagtatcagatataccaagatggcactctccttattcagaaagcccagcgttctgacagcggcaactacacctgcttggtcaggaacagcgcgggagaggataggaagacggtgtggattcacgtcaacgtccagccacccaagatcaacggtaaccccaaccccatcaccactgtgcgggagatagcagccgggggcagtcggaaactgattgactgcaaagctgaaggcatccccaccccgagggtgttatgggcttttcccgagggtgtggttctgccagctccatactatggaaaccggatcactgtccatggcaacggttccctggacatcaggagtttgaggaagagcgactccgtccagctggtatgcatggcacgcaacgagggaggggaggccaggttgatcctgcagctcactgtcctggagcccatggagaaacccatcttccacgacccgatcagcgagaagatcacggccatggcgggccacaccatcagcctcaactgctctgccgcggggaccccgacacccagcctggtgtgggtccttcccaatggcaccgatctgcagagtggacagcagctgcagcgcttctaccacaaggctgacggcatgctacacattagcggtctctcctcggtggacgccggggcctaccgctgcgtggcccgcaatgccgctggccacacggagaggctggtctccctgaaggtgggactgaagccagaagcaaacaagcagtatcataacctggtcagcatcatcaatggtgagaccctgaagctcccctgcacccctcccggggctgggcagggacgtttctcctggacgctccccaatggcatgcatctggagggcccccaaaccctgggacgcgtttctcttctggacaatggcaccctcacggttcgtgaggcctcggtgtttgacaggggtacctatgtatgcaggatggagacggagtacggcccttcggtcaccagcatccccgtgattgtgatcgcctatcctccccggatcaccagcgagcccaccccggtcatctacacccggcccgggaacaccgtgaaactgaactgcatggctatggggattcccaaagctgacatcacgtgggagttaccggataagtcgcatctgaaggcaggggttcaggctcgtctgtatggaaacagatttcttcacccccagggatcactgaccatccagcatgccacacagagagatgccggcttctacaagtgcatggcaaaaaacattctcggcagtgactccaaaacaacttacatccacgtcttctgaaatgtggattccagaatgattgcttaggaactgacaacaaagcggggtttgtaagggaagccaggttggggaataggagctcttaaataatgtgtcacagtgcatggtggcctctggtgggtttcaagttgaggttgatcttgatctacaattgttgggaaaaggaagcaatgcagacacgagaaggagggctcagccttgctgagacactttcttttgtgtttacatcatgccaggggcttcattcagggtgtctgtgctctgactgcaatttttctttttttgcaaatgccactcgactgccttcataagcgtccataggatatctgaggaacattcatcaaaaataagccatagacatgaacaacacctcactaccccattgaagacgcatcacctagttaacctgctgcagtttttacatgatagactttgttccagattgacaagtcatctttcagttatttcctctgtcacttcaaaactccagcttgcccaataaggatttagaaccagagtgactgatatatatatatattttaattcagagttacatacatacagctaccattttatatgaaaaaagaaaaacatttcttcctggaactcactttttatataatgttttatatatatattttttcctttcaaatcagacgatgagactagaaggagaaatactttctgtcttattaaaattaataaattattggtctttacaagacttggatacattacagcagacatggaaatataattttaaaaaatttctctccaacctccttcaaattcagtcaccactgttatattaccttctccaggaaccctccagtggggaaggctgcgatattagatttccttgtatgcaaagtttttgttgaaagctgtgctcagaggaggtgagaggagaggaaggagaaaactgcatcataactttacagaattgaatctagagtcttccccgaaaagcccagaaacttctctgcagtatctggcttgtccatctggtctaaggtggctgcttcttccccagccatgagtcagtttgtgcccatgaataatacacgacctgttatttccatgactgctttactgtatttttaaggtcaatatactgtacatttgataataaaataatattctcccaaaaa

SEQ ID NO: 102 - DNA, 4013 bp, Homo sapiens
gactgtgaggctgccgagcggacagcgactcccggggaagcccgcgctccgggagcgggagcgggagcaggagcaggagcagcgccgtcccaggccagaggcgagcgccgggcgccgggagagcggagagcccgggcagctgccggagcgcgggggcgcggcccgaggaaaccacagagcgagcccaggcctggggagggcgccgaacatctgaggcggcttcgcgggagacaaagccgcgcgtagagacgcgatgcccgccgatcgcgagcccggccggcgagggcgcggggactgcggcgtctgagcgcgccaagccgtgcgcccgcggggacgccgagccccggggccggtgcgggcggcggcgggcggggcccaggtgcgcccggccgcgtcgggcccgtgactgctcggggggcggcgccctcccgccgcagccgcagtggctggcgccgcagccaggagccatgggcaacatctcctctaacatctcggccttccagtccctgcatatcgtcatgttgggcttggactcggccggcaagaccacggtgctctaccggctcaagttcaacgagttcgtgaacacggtgcccaccatcggcttcaacaccgagaagatcaagctgagcaacggcacggccaagggcatcagctgccacttctgggacgtgggcggccaggagaagctgcggccgctgtggaagtcctacagccgctgcacggacggcatcatctacgtggtggactcggtggacgtggaccggctggaggaggccaagacggagctgcacaaggtgaccaagttcgccgagaaccagggcacgccgctgctggtcatcgccaacaagcaggacctgcccaagtcgctgccggtggcagagattgagaagcagctggcgctgcacgagcttatcccggccaccacctatcacgtccagccggcgtgcgccatcatcggcgagggcctcaccgagggcatggacaagctctatgagatgatcctgaaacgcaggaagtccctcaagcagaagaagaagcggtaatgcgcccggagcgaccggggagcgagcgagtgcgtcaagaaagaatgaatggatggatggatggttggatggatggatggatggatgagcgagaacccgcgcccgcgaacaaagagcgaaccaaagcgatgcttcgaatttttaaaacggaatctctgcacccaaatgcaggactggtgacttaaggagctgcgaagtctgatttaccggcctactctcgacctgccccccacccccagctcaggggaccttttgtctgaacgccagagctactgaccaggtcggggggccgcggtggggagtggaagagccggtcctgctgtccgccctcccagccccaggtggaaggctcagttgtcggaaagacaaaagcgatttcttcccactcctgcagggccagaagttcaggctgccccgcctccactgggggatcgcacctgtgaattacctgaggtatgcatttcccagaaccgtgggcgtacccaccttggggggcatgttggttctggggggaccacctctccttgcattcaggggctgtgaagctgagtaattttcggtcacagggcaggcccctgttgaaatttcatttgtcctgctctgggcccaaaggtggtggtggtttgggtcatcagaggactgcctgggacggttcagcgggcacggagcgctgtgctggcctggctggggatggccgcggaggtgcccttttcctggtgctttgtggtggctgcagaagaccagttttgttgagaactgcttttcagcctggaatcagacatcttccagatggtttggaccctgtccatgtgtaggtcattatcacacaaagagaccaataaaaataaaaaaaataaaaaaaaaaaaagacgaactattggaggtggtggccaatgatgcatttactgtttgcaggatagttaaaggtgtttaaagggtaaggcttttggtgtaaatgctggatggggtgtgtgtgtgtgtggatatagggacctccctctgtactgtgtactgtgtaatcggcattaatacctagactcatatgtatggaattttaaattctcttagcctactgattggtttggatgagcacaccagctgcaggtgtgtgctgaattgcaagatggtatttttttttttaaccaagggatgtctcttgtaatactaaccgcgtgataatgggttttcagacatgatgaaaaaaaaaaacttttacaaatgaatacttaccttagaaatattcaccttaggaaaaaagactttgctctgcccttttatattcctttatgctgcaagtggtgacatgttcagatttctaatttggttcattgtggcctatctggtttaagtctttcattaaaaatgtctcgttagagtatttgatgtcatgcaccaaaaaaataaaaccccaccttgttgcaaaagctgacctcgttgcatggaattaaaagagaaggaaaaacacaaggatgaagtctttccgaattcattcttgtgggaactggccttcggagccagccagcactttgggcaaatgcaaacaacaatgagtgcttgagataaaagaaagtgtgacgtcatggtcactggtactcaggcacttcacagtttacttgaaagaggctttggaaaatagataaagtgaaagaagaataaatacatatttttaataatgtaattttaaaaatcctttataatcaggactgagtcttggtttgcagaagctgtcacttaccctgaaacacagtatcaaaagggaaacttaaaacatactgtttgatttttttatttcctcttacaatccatgttttcaggtagaattatgactttccccccattgttacacatttctttacaaaggaggcctgtagaaattggacacgatcatgcttgagcatgtgagttagtcaaattatgagtccctgcctattgtccattacacaccgaatgttaatttaagaaccagaggcagaagttctggcttcctgcttgaaacccaattcttatatgaaattttttaaaagcagaaacctagcagcccatctgctttttctcttttgtcggtgtatttggtacccctccaatgctggtctttttgtagaaactcagtagagaaagtctagctaagcagtgttgaaaagcctgcaagatttcagtttacatatcgacagcatatccactgatttctaaatgggctggtcccatcatctgaagattctgtatagaattattaaaaaaaaaatccatctttctttattttcttcacatgcgacaatttcttaagcactttgacattttggtagttccacactattgagagaataatatatttattttgtgacattgcagatgccaaatactgtaaccttctcatgataacaatacttaggttcaagatcactgttcaaaccctgtcatgctttaaaactgatgcgagatgattttgttttttgcataatcaatacttaagggtgcaatcaactgttagtaattgtgcagtaaagtaaagccctgtggtgtatcaactactagttaagagtctcagttgatttctgtaatgtttgacctaataatagcccgtttcgtctctgacccaacagaggaagcacagatcaaatcaccttggagtggtcaccagggggacagggagccccccaccaatgtatcaatgggtgatttatgatgccttctgccctttggcgagtgaatgggtttcccataggggaagttggcctccctccgtgagctttggaaatgttttctaatagacacagggaggccagttctgtttcagagcaattatcttcccaaattctctgttctggtgttggaactgtgtgccctggtttctgttttcctttctactgctgtaattctctgtctcatcatccttctcttttgtttccatagccttttataatgcatatatgatgctgtgaacagaaataaattatttatacaatcaaa

SEQ ID NO: 103 - DNA, 41348 bp, Homo sapiens
acagccattggtcaggggcaaataccactagctctgcatcctcagtcactttgtgccatttcatcaggtcagagccaaaggtaagtttttatacttgctttcttcttgggtcagagttctttccctactataacaacctttaaaaaataatttaacttgccttaatgtcatctggtgaattttgattcaatggatttggtttatttttgttattgactttgtatttatattattcttggaaaatccaaaattttgaattagcttaggaattaataacatacagcaaatagttaatctcagtagtcatgacagatgccaataaaattagagtagtttccaatatatgccttaagtaaagtttcctgacacagaccacattctttgccagtatagacaggcactattgattgatattaattgaaattttgtgaaaagggaggaaatagtgaaatttcctgagattaaaagtattgtaatgattacatgacattatgcatttaaaatttttttgagctatatattgaaagttttaaatacacaaattttaaaatattaataaatggtataaagtgaacacaaaattaaagtgttaattaagaaactacattaaatgctaatacaattacttgaagaaaggaatataaattttttaactaaacatagatagatgctgtatatatttttaagattcacacagcctgccttatagttgatagctctaggagtgatgcaaaatgcaagcaaattctgagatgtagctatatgtaatcaaatatagtatgatgtgagaaaaaaggccagcaagtgtataatttctttgaataatggaagttgccagaaacatataaggaaaaattttttttaagttggtagtggcttctgttaatgtttccaacttgattatgggagaatggttcctggaagatttgcaaacccactgttttattaagtaggactttgttggtaattgcctagaacagttccaaatctgcaatcctgcaaagacttctgcaaaggcaactgaaatagaggcttagtttatcctgtgtgaataagaaatttatttgaagaaagcataggagagctaagaaggagctccttgtactgcttcttattctcagaggaatttcatatccttctgcctaaacctgcttcataaaggctttctttcaagtaactgaaggtcattttgtctgccagtgcattcaagtttaaaagtaatatttatcatgaattcccttttatatgtatgcataggtagtaacaccacaggtactgttcttaaagtaaacccaagaagtgtgtccaaatgtaaaagcctctaaaattagacatgcttgatacagaattttacaatactttgcctgctcaataagggatcactaggtaacattttggtaagactaacttaaatgtttcaaattaaatgtgaagattttttttctaaaccaaaatgtattcaaatgagtacatacagaactaaaaaaataattaaattataggatcttgattgaatcctcaaaaagcataatgttataatggaaaataagaattgtgcttattaaggaattaaaaaacaaagatggctataatcccacaggcatacaagggaatcttaccaaatagtgccttttaaacatgtattcctgttggttctgagttcaaatcttagatagctattaagaattaaataaaatactgaggactaaaggaaattttttttctattctatttcattaggagcattttgaacaatattgcatgaaatactaacgtacatattaaacaatgtatgtatttatatgtccagaggctacaaagaagtaacagaaaaaacaaacaaaactttgttactttgttctgaagaaggccttagacttaaatgtacaagaaacagttatgagtcctatttttaaaattatttttaaaaccccaatgcctaagccacactgtggatcactgaaattggaattatttgtggatatcctagttgcattaccagtcaactctgcctcagtttcttcacctataaaatggtatgacagttgcagtcatcatcaccgtcatcatcattatccttatcatcttcaacttcatatcccagagttgatgaaggatcttaatgtttattaaatggtaaaattattagatgatgaaaagcttttgtgaataagctctgtttttctctataaaataaaataaaattttactgtaattaaaatatccactgtaaaattagagacaggtttgtgaattaatttgaacatctggcagcaatggtcctaggaaatcagatgattttgtgtgttatgtttataaattatccatggaaggaaagctaccagcttgagttctttgatattgacactaatttatcatttctatttagtgcaaactattcataagttatcaattaaatatttatgcattttaatattttataattaggaaagcttgaaaaatgaagacattagcaggacttgttctgggacttgtcatctttgatgctgctgtgactgccccaactctagagtccatcaactatgactcagaaacctatgatgccaccttagaagacctggataatttgtacaactatgaaaacatacctgttgataaagttgaggtaatcgatcctcctactcttgaaactttaaaaagcataggatgaggaatgacttgggtctgttttcctcaaatagatgtttgggtttttttataagtagaaagattttatgttaataatttcatattaaccttttctccaaaacatgttcaatcttttggaggttaataccggaacagtcttttgcccttttttttttttttttttttttgagacagtgtcttgctccatctcccagactgtaatgcagtgtcgcagtcttggctcactgcaacctccgcctcctgggttcaagcaattctcctgcctcagcctcccgagtagctaggactacaggctcgtagctaggacacacgcagctaatttttgtatttttagtagagatgggatttcaccatgttggccaggatggtcttgatctcttgacctcgtgatgcacccccctcagccttcccaaatgctgggattacaggtgtaagccactgcacctggctagtcttttgtttttttaaagctcatgttatttccttcaaattttattgccaaattgaacataaaaatgtatttctgtgaagttagaacagagaaaattagaaaaagtcaatcagcaaggaaaagagttaaaatggtatgcacgcaatgatgtggaaaatttggggtaaaggagaaagatgtgagattgaaataaactagaagaaaataataatagagagaaagaacaatagtttggaactccactgtagctcaacagtgaatgtgcttccctaaataactgattgtctctccggcagtaatgtagaaattggcaaggttgtagcccattccataaatctgatatgacatgttcctaattaaatacaagtcttttaatataactaaaggatacaggctaatctttatgaatcagaaagcaaacagaccttgaaatgcaggagtgtaactaatgtgcaacactgacaaagactaattaactataaataaacaaaaagagaaattacatcacctttaaaggatcataacatattttgggcaatctttaaagtgtaaatcttcttagaataactacttttgataaccaaggatagaaaatatttagatgaaatcgtatatttaacttgtattgaacttagatatatctttactaagaagatactaaaatttttcaatattgtttatgttgccttatgaatacaagagtcagattttcacaatgtgatagattttaaaaatctactcccctctcccccttctctctcttactttcaccctcaccctcttttgaccctcatttcatctttccctcccatttttcctctctttagtaaagtttaggctctacagcagattatttttcttctgcacatttgattgtgactctaagtctttattaatattcactgtttgatttatttcactgtatggattctgtctgttaacaggattttctgttgagaatttatggttgataacaacaatcttggcctatgtgacttctacatctccaatgtgatgcatcaatgtagaatataagatgaaagtttttcagtggttaattcatctgccttgcttcttttttcatcttgcataaaaacacatttttttaaaaaaaagttagtgcatttctgaatttatctatcaaattaaacattttagttcaaacttatttgtcatttccccccaaactattccagaggatcagagagatttgatgatcactataactgaatcttctattttgagtaggttttgggaatggtttcaagggtgctatttattcctttcacaagtccaaatacacaatagaaaaaaaaatgctgtttgggatcatggcttctctaggcaaaaatgaaaaaaatgactatatctgcagagctcttttaacccattccttaccatcaggatcattttcactgcccataaagctgtaggcattctcatgaggttcggacatttttcatgacatcaagaaatttaagctaacaaacatatctgtataaacattacttaatatacaatattatcttagtatctgtgttttctggaacaacaacttcctgtggaatgccaaatataatgtgaaataccaaatataaagcattgcgtctttacatacttcagcctttaccacatacaaacaattctaattttacacagagtcctttctgagaaattttacttcaaaccaaacttagaatactcagtgagtgagggatccagagagccactaacaatcccttgtggttgactgaaatatattagttatcccttacttaacattccttggtgatgaactcatgatcagaaaaaccagtttgtaggtagacggtatagatacagatataaataggcatatacatatgctataataactctaatgcacttaaaataaaacctgtagttttttaaaatatttatagggtagacctagtaacaagaaatcaaccaactcactcatccattatctaagaaaaaaagaaatacaaaaacaaaaatatatgataaagtaaataagatgacatgaggaacaaaatttagaagaactttagctcagatattaacaaattaaaatgaattgcttttcaaacaagcaaaaaaaacagcacacaatttcttatggggtgatgtaaagtaaagatgatagatccagtcatgtgaatagattaatagagttactcatgacatgaatttcttcatgcagtcctggaagtccagatttcagtgactcgtggtaagcatatttatctcatttttatatattaaggtgagttgtttcaaatgttcttgatttcatatgaaacattctgactaaatactactaacgtaaccaatatagggtacagttaaagaaaaaaatccatggtaagtaaagcacatggaaaatggtaggatgagattcttcatatttttttaaatctcctatgtgtgtgtttctgcctgtttcagcctagaatttatctcatctgtagaatagaaaacctttgttctaaaattataaatttataggataactgaacaatgcctttaacatatgtaccagtttcttataagttataagacttggcattttggactagtgtaatagacccttggtttaggctttggcagattaattcttaaggcctttgatgtatattgcaggcagaattctaagatgttccctaaaagtcccattcctagtatacccatgccctctataatccttaatatcatgggtatttggggatatcacttctataattgggctatactatatggcacagttgaatttaagaaagggagaccacctaaaagggcctgacctaaactcatgagatgtttaaatcagcatcttgatgtcagagtcaaaatttgaagcatgacagagattcaaagcaaagtgaactgtgtgttgatgacttaaaagatagaaggaccaatttggtaaggaatgtagaaggcctgtaaatggtgagagaaactgatggccagtaagcatatgtggtcctcaggcctacagacacaaggaactctgagctctgcatgagaccacagccctagtcatcaccttgactttgaccttgtgagacccttgggagagaagccagtcagatcaggcctgaacttctgacctacagaaactgtgggctaaaaaaatgggtatagctttactaagtttatggcaatttgttatgcagcatgaaaaaattaaaacaagatagaacaacttaaaagttttttatctgaaaatcaaatttgaattattccactgtaagtgttgcatttgcatttgtgagtctagggatttaggtggtcaataagtcaaaccatccccaaaacccaggggaagaatctcaattgagctttgttgatttctactgatggtggtagatttattgcctcctgagttgttgagaaagggtcattaaattatttgtgtttgaaaattatattcagtaatataatttcaaactgattatttgtgtgatttctcatgatctagaatatctatgatccattgttttctatattagaagcaagttttagacccaacaatgccatcagagtgctatatattacccagtaagtacatttattggtgtgacataaaatggttgcagcttttactgcactttcattttactctagtgctgtgaataggaatgggttgtaggctatatgatcaaaatgtagactttttgctttctgataaactacagctaaccttaagtgagcatttattatgtgctaggtactgttctagtcatattacatatattatctcatttatttctcacaacaaaattatgaattgctattgttattcctattgaatagatgaggatttttggacaaagagtagttaggtaagtaacttgactaagattaaacagttagtaattatatatcataatagtgatgctgtcttctcatatcacaaaataatttccaaaagggtgataaaagactattattctgcccccattttctgtcaagctctaaattgttcttttaacttgatatttgttttagttgaactgaatgccaagtactctacgactcccaaaaggaaaagaaaagcctttttctatgggtagataatgtgaactagaggtaacctttatagataatggactctgttatctaattattataagaaagaatggcataagactacttctaattgtaagtatgcattcttcaacatatatctaagttctgggctataattttatgtttatcacatatttactagtctaggaaaacatttttccatgtgccttaaagggttcatcagaaaactgcattgttcaaaagttgatattctttgagtgttttaaactgagatagtctttttgatgaaggtggttatttgaagtctccattgtcatgttatagttttaagttatttatatttcattttgcttaggttggagggggcttcaacttgttttctaagaacaacattagccctaactatgtgtaatgcatttttccagcaaagtgcttggtagcaatattaagatgtatagaggctctatagaaggatgtcaacatccactcatccagtaaaattttcttggcttcatccagattaataaactcctcctcacctctactacattaattaacgtagccttatataattacttttacttttcctgtactacccctgtgtattcaataaacaccaagaaatgttatactacaaagtgctatagagctgttaattgtatttgctgtatgatgacatggagggcatttacaatgacattaagttatggtctttgtggggatgtgtaagaaaaatttctctcaggtctcagtgtcagaatgggttacaacttctaaaaacagttgcttactttctgggttctatattggtaactgagtgtgcttgtcattatggcttgcctgctcagcaacctggagcccaatttttgtctcagtcttccctggtttcatataactttgcctacctttattttcttgtcacctcaactacttatgtagatttttaaaaagtattaccatatgttgttttaaaactgtccgtatcctttctggaatgatatggtatatgcattcatcagtaaataactgtagcaatgaataaaggaatattagtaaaaactggtcatagaaaatttcttgcatgagagatgctttccttgatattaccctccagtgatcttaaaattgaggcaaattctcttccatggacagataaagtggctagattgtttaaaatcatccttgtaaagagaagtgccataaaatacagcagttacagatgatgaattttttaaaactctagaagatttttgaaaggaatgaaaattatatttaacaaaattgtaggaatggtagagaactcaataagggcagttgtatcaattaaattttgaggaatggtttctttttatttgtctttattataatatggtgcaatgcaaactaaccaagcctcagcaccaagcaatatactcctataataaacctgtgcatgtatcccctgaacttaagataaaaataaaatttttaaaaaataaatagataataactttagaatatatgttgatgctctgtaacaccagaaattgcttaaggagaatcaagctaattccggacaacttccagaaatcaaagcacattttagataatgatatataaaaagtatcttaacattagtttttctaaatataataaatcggtataggactgcattgatattaaagggtaattagtctaggaaattgtctctgtattttgtgaacacaaagtacttatattagtaatatttatactattctggtggcaaaagatatgcaatacttatctttatatttaaaaatatatcctactttggccaatttatacagtatattttaaagtttcatacatatggtttgcatactcaacactttatgttggaagaagaaactttaacacgatcagcctgaattaaatatctttttccagagtacgtgaaaaataaaagctaatctctctctttactaaagatgatctacaggaagggaggaaagaattttgctgatgagattttaatatggttgtctcattgactttccataagattcttttaaaaacagtgttgaactatttaattctcatcctaagctacagtatttaagaaccttaaaaacttaagcaaaaaaaaatatacaatcatgtaggctcattgggaaaacaaatactgataatctttgctggtgacttctttatatttatattatatattatttatgagaccacaaacataagataactcaaataactaaccctggaaataaggtaatattgtaaccatttgataaggataactgcagaacagaattttgccccgagttttcatctagtaagtttctgagtaaaatttaatccagtcttttaatgctaaaggagagagactttgcccctaaaagcccccattctttttctgcttcttctgttttatctttacttctttgagctgtgtccaatattgaggtttcttttctctgaaattaagtgatttgattattaagaatcagaaaaacaaacatttccaagtgattacaattaacacaatattcaaacatctctgttagctgtcaaagtgtttaaaggggcaagaggtaatatgatccttctgaactgaaagctgctttgtcaggaatatgaggattgagcaagctttgccaaatacatttcttcctcatctattttcaagataaaatagaacttaagatacagcttcattgccaggtattcatggttacggtcttttagataattaatgtagatcacggaaacaaatgtgagcaccaggctcatgtttaaagcagaatttcactgtgcttaacatatctatatgtcagtatgttaaacccataaaaatacatctttagtaactcaggccaaacagtgcagagccttttaacgcctttagaagtcaattgttgccgtagtggtaatacagaggagtagcttcaagattaatttattcaactgtgtagaacaaattgagagacagataaattcaaaatttcattttgtttaatgaaaaccttaattctgtgcttgagtaaaagtccaaatattctggatttcaaatgcgttttatttttaaaacaaaacaaggaagaacagtaatttaaatattatcagctgaatattatctgctctaggtctgggctttctcaataggaattgactggtacaatgggtatcctaaattaagtgaataaataggtacagatatttcctttccaatttggctctgcttgagcacataaccattaacacacacactaaagaataatgggagaaactattggctttgggtgttgctcatttctacacccatttcctcctcattgggagacagtcttgtcataatgctgaataacccagggcctaaagtcagacttctagatgtaagtgccaggtctgtcacacaaactgtataaccttgggcaagtcatacaacctctctgggcctcagttttctatttagaagataccttttgaggattaagtaagataaacatgttagctgtttaatacagaacctggtacatagcaaatgtttaataaatgcaagtaactttaccattgaatcactcactcaattaaaagccactgaagcttatgtgctgatgatcacagatgccttaaaggaagggattcgatttgggctatgatgaaggctaaccccattgtgcttgggttcacattagatccacttaccaatcttttgctgagagccaagaatttgggaaggcaaattagaccaaatctcttcctgtgccttggcattctcagtctagtagtcttataagtattttcagcacaatagaggaagtttaaaaagacacatataagatatatgtatacgagatctgtagctatctattggaatgtaagtttttatgagttcactcacaaaatacatatgctgagaaatgatgttcttgaatctgttattagttttaaatctggcagctaatctgagatataaagtatttactcatttatccatcaccttttcttaacagtatttaaggttacttacatgaataaatgctataatatgcacacaaattaacataaaaagatgaaaatataaatcttagttcaataattttatctcaaaatattatacataataaatgtattacatataattttctattatattatctgctatatcatatcttatatatattactgatcatgtgttatgaggtgacaaatacaaacttagaaagtgagacaaagaaaaaataacagttgggaacataatacaaagccaggagtcagatagatacatcaaaattgaaaccattttgtattataactcatagagattcatgaaaatagtaaaggttttctgggcagtaatgctaaattttagggaacccctatacttgctcccactattcctatctaaattcaggatcaggtgagaagaagaaatgggattcacacagaaatagagctcaaaatgttctattttatgttgataaaggcgaggtgtaccccctaaatttaatgcatgacttcagtgtgaagcaagtaagagcttcctaatacaaaactccagaaataaactatgccatcagtcacaggcaatgctggccagccacaagcctcggacaaagtctacccccataaatctttgttcatgcaggggcaaaatgaaatgtatgcaattgatagtcaattatccccaaaagggaaggggaaccatctggggccagttccttctctcaatcatcaattagcttaggagtgagaaaagggatcaacagaggatctaagaagagatttgattgttccagaagaaagtcataagatggaaaccaacttggtttagcctcatccagatgttagtcagtttttatgtcccttgactctggtctgtaacctgtgtactcaaacacaatttggagaaatgccccaccaaaagttaaattatgatgccacatttgactaatattagagctgttcttctctaagtgtggtccctgaactggcagcatcagcatcacctgggagctagtcacgaatgcaaatactcagatcccactccagacctagggaatcagaaactctacggaaggagctcagtgaacaagccagatcattctgatgagcctatgatttaagaagaattgaactaggaaaattctccctaatataatgttccttctctcagagtaacatttgagatctttccgttttctggcacagtttgtaaatatgcaatggtggcagaatcagtcatccagtcttacctgaagtttctctttctttctgaatatttgaaggctttgaattcccctttttgtgctaagacctatctttctggcaattgatgctgcattgcatatgtgttctatcatatgacagactctctagtgagcatgtattttcagccagagggttctccagcctggatgttatatgcccagtggcttctccctttcctcctgctatggatttcaagaagtctacccctcggaaagttttctctattccccatgcttttttcacctgaagcaggaatttctaatcccctgcctgtgcagttcttaacaagctgtgaggcctgtcaggaaccaggccacacagcaggaggtgagcggcaggccagccagcattactgcctgagctccacctcctgtcagatcagcagcagcattagactctcataggaatgcaaacactattgtgaactgtgcattcaggggatctgagttgcctgcttcttatgagaatctaatgcctgatgatctgaggcagaacagcttcatcctgaaaccatccctagtggataaactgtcttccacaaaaccagtccctcgtgccagaaaggttggaggctactgatctgaagaatcaacctcagcatattttcaaactgaagttgctgttgatatttttgaagtctgtgcccccaggagcctagtaaaaaacttaccacattctcctcaagactttgttcaatagttcaatgttccagacttaattagtgtttctgtctcctacatccgagtctgcatcacaagtcacttctctggtgcagtgattctcaaccttggtcacatatttgaatcagctctagagctttttaaaatcccagtgcctaagccataccctggactactgaaattggaatgatttgtggatgagacccaggtttggtgtttggctttcctcatctatattttcagtgtcacatgcagttgtttttaaaaaattaatatgcttcttaattttatctctttacttctctagtactgtgtcatctagaaaaagaactttctttttaagttattttttattttctttctgttccacaccttcattttcaggcatagttcactacatttcataaatcagtaacttatgaatctgctaaaagtaacactgtccaaaacattttggaaatcttcacatttctgagttggatattcttaattggatatgttgtcccatcagactaatttctaagccagaattgggacttcacttgttattgtcctgcctagccctccattaatatgcataattttcattggatcttccctaattccacgtttctcattctcactcctagggcaaattctagtaaaccctgtcttgagttttccagggacagagaaacttaccctttgttggttaatgtgtacacatataggcatgaatatctccttgctaatattcaatgtgggctttaaagagttaaatagcatgtatgcaaatatatattatatactccattccttggcacgtttgagaagaacaaagaaatatatctaaaaaatattgagactggataaaatctttttttcagcgtgttctctctagagttataatatcaaaactctgattaaagacataaaattgaaagaaattaaatctaggccatttaagataaaatagtttattctacgataactacactgaatctgtaatgtataaaaggatagaatggacattgaagaggatcagtaaattttggaagtagagagaaaaaaagaatatcccagagggtaatgttgtcaagtctaataaatcactattcagcagtcatcttttggcagggtgtttttttatcatgctaatgactgcaaaaactcatgagagctaatatatttaaagagttcgatcccttggaaaagagtccttcttttgccttatgctattatggagctgatttatcgtttgtacttgttctatggtcatcaacaatcttttgactataattagcttcccaagtgggactacctacagagaatgtggtggcactaagaggatgaaggttaacctttaggtttaatgtggtctttgaacttgtttaagataattttgccccaggagataaaatcaggtttctaagttagtaaaatttgcaagaatttgccagtgatactggacagtaataaaaaattaacatgtaatgattatccttttcaaaggcaattggcgattacctggtcctctctgggatatcctttgtaaacacacatttttttcttatacaaaatgtgtgtagttaccctgtgataatatgtgcatcatcattatcattgtcattatgtataaatactagttttatccaaagaagttctacaaattaaaaggcatggatttatgcctcaataaaggctgtgttacaagaaacaatttgctttgtgttacactgagaaagatagaaactgaataaaaaatactaaattactccatcagaaataaagagctagagttttgaaggttccaaatatcttcgttttcagtccaacttctttgttttcaattactgtgactgactcgctcccctcctcccatcctcatgagattactgatttcagcctacattaaattgcctaaattgtctttctggcatccttacatggggaacaagggcaataagggggtagggaatatgaactgactttgctattagataatgtgtctaaagtgtttgccaaagttccctaccaatattatttggagacatttaattagaactagatgacacattttaagaaacttattaagtttctggagcctaaggagatgatggtgaatggagtcttgaataaactgggataaagctgaagtagaaactctttctggtgactaaaaatggaatattgccattttctgacaataagaaaggaagtaagaagagaagtatgtgagcaaagaaaaaatactaaagtccccaaagagacaaagactagacggtatgattaaatgaaactgtaaaatcagctcttatttctttggcatggaatttttcacttaaacattgcattgtgtatgagtaagcattatcttttagagttatgaatctatgaaaaataactatacattgggatagatttaaaaaaaagcatgtacatgttctaaacttgatatcctagcaagtcaatacaaaatacgattttatgatatttggtgtaatcaaaaggccattaactattttgatatttgacttgcaaatattcattcattacataactttgttaattttgacttcagttagtaaaaactgagatttaacagtaaataaatggaaataagtgaatttacacaaatttggtgatattatatttcagtaagtactacaacaaataagatctaagaacagttgtttataaaaaagaaatcagaggataaagcaacaaaaatatgcttttattttttctaatgtcaatgatatgtactagataaatcaacctataattagtcatcccttaaaattgacaagtatgaaaacttttatttaacattgatataggaggtttgcaaactacaatcatgttcattataatttttcttacttttatgagaaataagtattgtgtcagaatgaaactttaacctatatctacatgatgggtgagacaattccatgcattcagctgtttcattttccttctgggcacttagctaaaacacattgtttactttttctaagttggctcatgtggctagttctcttcccttaatctgtcaatggatagacaataccagtggaccttgaagtctcaagctgaaaacggtgaagtcctagcaagaaagaaacttggatctctgagtaactacataaagtcataaacttgtttacctgcattagatagtcatgtcagcaagatagaatctcttattgtgttaaaccactgggattttggacttgtttgttacagctactaataagacttgccataatatagacattttcaacttttgccttattatccatttcccagttgtataaagtgagcaatttttaacatttttgtagatgatttaagcagaaatatacttggctgagtacagaattcatgctagttattttcataattggagaacatttcatctagcccatgatgagatccaatgaaacctttcttctccatgtcagatataatctctttactggactgaatggttcattttcaacaaatttaatatttccctcctccaaacagtcctgaccataataacaaaccattcctctctgaacacagctttctaggttacctccttagcttactttcttttctttagctatatcgtcatcactaatcagctagagtcaagaataaagaagctgctcctaatggcttcagaagaatcatttcctctcattgggcattttaaatatcacttttccatgatgagaacaagtgaaagtaacttcaattgcttggcaaggggaccttaatatgactatctctggccttaggtatatctacactaaaatatgccttgtttttcctgttataataggaacaatggtatcctcataaatatcaatgaatcaataaggatctcagtgtatacatgtttttactttctctttcttcaaggatttcctggactatccttatttcccatttgcacatacaggcaaaggaaagattaataaaaaattatccttccctgactaaattggggttttcagtcaaaattgtaaggagtgtgaccgagataaagaggctatagagaaagaaaagagaaacctaggtgtgaagactggttgactgttcacttagagttaatatgtactcaggtaaggctattacattgtacacatctaggaagcaccattcacatagaataccacatagatagtgcttctcagagttgtgcaatggagtggttctaccactaggtgtataatttttccatctttctctcaaatacagagcatatctagctaaaattcttggctcagcaatagattcaaagcttgtttcatctaaaaaagttgaagcacatcttctttagtttcctttcataatatgttagcatgtataatgaaggtccataggcagacatggagatgtctgagccatagctaatgtattttcatacctgctttctctatgagataaataagaaagacacatgaaatgtggtctaacaatcaaagacaggtttattttagagaaataaacctgagaggggcttctggccaattttggtcaggagtattctcccttacagactaagagtatatattggttttagggtgacagggcccatcacaagcttggaatgtttctgtgtgggggaaattttatggtgtggttggaatgtctctgggcggaggggaggttatctcagggctagcatgtctgtggttggggaggggtttggaatgtttctggtcagagatgttattgtggtttatggttatgctgaccttagccattaggttgataccctttgaatttaggcatttttgatcaaggtaaattttaaaatgacagtgcttgtccaagatggtgatattcctgctctgtcactctcatgcaactttaaccattttataatattttcttactcttatacacaaaacaatcatttaatgtatcaaaaattgccatgatttacccatactgattcaactgtatttttcaggaggcctaataattgctaggcatactggagtagcagctgggagtataatggggaaaaaaaagaaatatgtagtatttatccccatggggagagattaatcaaatactcacagatacaatataaaaaactgtatcagttagcttttgctgtgtaacaagcaatcccaaattttggttacttaaaataaccatttattcagctcatagtcctgtagttcagatatatgggttccgatgtgctgctggtttgcactgggttgactcaggtatatgctaggttggtacagtgctggctggactagcttggcctcagctgaagtggctttcccctcccctccaccgtgtgctctctcatcttccaacaggctggccccagcttgtttatatggttattaaatagggttcatagaggacaaatgaaagtttgcaatgtttctggacaactatcctgcttcctaccattctgcttcctctggtatttgagagcgcagagtataggggttggatacaattggatatagaggaattactgtttcattgatgagtctaagattttgcactagtctatactgaccatttggtttttgtactcctagaattggggtgttgcagggactgctgcattttcttactaagccttgagcttttaaatgtctaacaatatcctgtaatcctttgtgagcttcaggccttaagggatattgcctttgataagaagagtggtggggtcttttagcctgatttggactgggcaggcattttttgcccctctgaattgtccttccaatacccagacttcagggttgattccttcctcaagcaggggacaacaaatgggtaacttgttccccatattcatatagataatagctccaactttggctaatatgtccctccctaataagggtgtgagactttcaggcataacaagaaaggcaagtgaaaagagcaaattctgccaatcacaaataaggaggtgggagaaatacctggttacaggctgtcccaggattcctcagatggtaatggacattgaggacagctgtgtgggacaggagattaacactgagaaagccacaccagtgtccaggaggaagttaatttcctggccttcaatggttaaacttacccagggctcagtgagggtgatgacatgagctggtgcttgccccagacaccctcagtcctgtcattggatcatctagttagggacttctggcccagagaacctttgtcctctagggcagtgcaccttccagtgattgccttggcataatggacatgggcaagggggcagcttgtttctcgttggacaatcttttgtaaagtgtccttgcaaatcacacagataacaagccctactgggtgattggcctgctccattttctgtcctctgaaccaccaaggtttgtttgtctgagagccatgactaaggctgtggcttttctctgatatcgcttttccttttcagcctgttcctcttggtccctattatagaacaccaaggttgccaggtttaataatgcctccagattttgttctgggcccagggctcgcttttggagctttctcctcatatctgtggctgattgggtaataaacttatctttcaggatcagttgacttttgagggagttggatgacaggggagtatattttcttaaggcctcccatagtcacttgaggaaggcagaaggattttcttcctttccctgagttatggtggacatcattgaataattcatgtgctttttcctaattctccttagtctttttagaacacaggtcagcagatgtttatgactccagtccccatgatctgggtcgaggtcccagtggggatccatactggggacagcttgctgaccagtaaggaatttgtccctttccaggtatctccaaactctcaggctgcagctaaagccacattcttttcattaaaagccagggtttgatctaacaatagcatgacttctctccaagtgaggttgaaggtttgccctagaccccgtaggacatctatatacctatcaggatcatctgaacacttccctaggtctactttgatctgctttaaatcagagagggagaggggaacatgtacctgggttgggccaaattcccctccccctacagcttgaagggaacataaccgatagcccgggggtttttgtggtcccctggagatttctttgcttgtttccttctgggtggaggagattagaggaggcttattaatatgaaggggagctgtaggaaggttaggatacggaggtaagctgagaggtcctcctgtgagatgtaaattgcaagctttgcatagttgtggattctccttcagtgaaaagaaagcttgaacataagatatttcactccatttgccttccctcttacagaaaagatcaagctgcaggatagtattataatttatacttccctcaggtggccatttttccccatcacagagagaatattggggccaggccatagtgcagaaaaaaaatgagccacatctttttcagagtttgtgggtcaaattggtctcaatggcttaggatgcattttaagggtgagcctgttgatgcctgaatgtttcccatttgaaagaaaagaccgcctgtggttttggtttgtttgttccccccaccaccaacccaagaacacacaatggtccctggaccctgctgatcggaatagttgcactcaccaatgcagcagcagaaacaccagttttcctcttagaccacaaagaggaccaaggaaggtcagatttagtggtccttaccaatgcattctcaaaaatctgttagagtcctaagcgttttcctgttagtattgggaccttacccctgtcctataaagatgttatgccccaaaaatgaagtggagggccataccctgagggagggatgggatctccagggttggaagagtgatgccttttgtcctcacttctcatcatatgaataggaaggatatcatttctgaggctccccatatcctagctttaggaatagcttttgttaggcctgcttgtctgaggagggatcctaaaattccagatagtaaccccctccaatggggctttgggcaaaaattatgtttttctgattggtgagcctgggtgcctaaagaaaggaacagagtcccaaaatttatgctagaaatcattcttataggaaaaaatagaaaagcaccagagatggagtggtttttagaagcaggactagcctcagagaagagatgtgggaggaagtttgtctgacaggcattagtacccaggagtcaagggtcaggatagatagaatagatgggcgagtctcacttgggcgatgtgactttgagagttcctcgcatggctgcagggtcaaccaactttttgttgggaccccggagctgaatggctttcctctctgtcaaccctcagctcagcccggaagtataagaaaagcagaagctggtttcaagcaaaccaacgctctcaactccgaagagtcagggttgttaaagagccctttcccagaaagcctgacacccatgtctttagtctggcagccgcactagttgcttttaactggccaacaggtgcccggtgtttagcctctgaattctaaggaaaaataggacagaatagcaagctaaaggggtccaatggtactcaccgcttggtgatattagaactgttagtagttacaactgtagataacttatctcatggtagcctttgcttagggagtatattttgtgtccatgaaacagtatctctattctggagatgacaaatgcatacctcacattgactacatggctactaaaagataaaatgtaagtgttggtgagtttgtggagaaaagggaacccttgcatactttgttgggaatgtaaatcagtacaatcactatgaaaaacaatgtgaagtttccttaaaaaattacaaatagaactaccataagatccagcaagcccactactgggtatatattcaaaagaaatgtatcagtatgttaaagatatatctgtactctcatgtttattgcagcactattcacaaaggccaagacaaagaatcaacctaggtgtccatcaatggatggatggataaatacaatgtggtatatacacacaatggaatactattcagacacaaaaaagaatgaactcctgtcatttgagatagcatggatgaacttggagagtattatgttaggtgaaataagccaggcatagaaagataaataccatatgatctcagtgtatgtggaatctaaaatagttaactgcataggacagagtggaatgatggttaccagaggcttaggtagttaggcagaagagggaaatggggaaatgtaggttgaaagatacataattacagttaaagaggagagaaaagaatagtccagaataggcaaatacagaaattatttgcctaatacaaatattaggcaaaagtacaaccacaaaaagttggtaagtgattgcctggggccaggaggttggagaggggaaggagagaggatgagaagagagaagttggaaatggctgttaatggttgtagagtttttttcttgggtgatgaaaatgctataaaattgggtgatagttgcgtaactgtcaacatactaaaaaacattggactgtatactttaaaagatgaactgtataatatatgaattacatctccataaagctgtttttaaaagattccattcttactacatctacactagaggacatcctaactttatatcagtagtctattgctgtattccagctaagagaggatagtaatttagataatggtgatgatggcagatagggagcgaaagtaatgatattgatagatgtttagaaaacaacattgacaaataaaatgaagacttgatcataacttaagcataatgtttgacatagacattttagataattataaagactggcaaaccttccatcatttacaaattcacacattcacctggtgatccttttattcattcataaaggtaggaatcgaatctggtttatttgaatttcttaacagcatttttttccataacatatatattacattatcattgatttccttattagaaacttagctgtagattaactaaaattaaaatattaaaaaaagagttttattaattcaaacacaatgttgaatggcagaaaatggtttatgatcctcataaacaggtataattaacatgttcaacaagaaatatgtactaaaaggactcagtggataatgaagcaatcaggaagatgtgtgattgctgtttctgaacacaccagtttttcatatttttaccctgaaattaagacaaaaaagtaggcttagtggcagcaatataattatatagatcatttaaatgcactttctgctaaggggcaaatgaatttcatcaaaattattgtaaaccaaatcttattgtcacttaaaatggttctgagtgtttttacagagataattttctgtggacaacaatggtgattatcagaaaataaaagttttaaatcttttgtcatatttttaataataacacaaatattgctagtaaaagtcccagttcaatctgatacaataaatgtaattggatgattttctgcagagagtctttatttctccagggagcagaaacttagtctgagacacttcagggtcacttcaaccgcttttaccctgagattgggttgaggtgatatgttgcttacatggagtcagggctgtgcagggtgcagagactggcacaggcctaagtacttcttctcttggtagttatctcttcatactgacatctgctgatatctcactcagcctaggccactgtgagctatccatttgtcatctctggaatagatatactgtttcatggacacagaatgtactccctaagcaaaggctaccatgatataagttatctacagttctaagaccaggtacagaagagaataaaaatagataacttactgcaaaccagtcaactcaaagatgtactctgctggtacgatgttaagaagacacacaagtgcagtgactttgactgaaatcaaagtcatacgtagtaatgaccatttgtattatatttttaaactttagggaaatataatgaacagatttaaaagttaattcaggaagaagcaagtcagagtaaaacaagcagtcaaataaaaaagaatagagcataaagctgaaagaatttatgaatatttgtagaagaggctcaattatgtttacattcaagtattaccaattgtagcttgagaaaaaagacagggatttttttctggtcatttgtgtttacgttcaaatttagttttctgcaacataagcatacaagtctgccacacagaaggccaggtggtcttgtttccctggactattttttgtgcatgtgtgcattgcctcataacttcatatcacagtacgaagatggttgaagaggggaaaaaatgcctaaatctcttctatttaatggtgaaaataaatgtgtctacaaaacaaaagtctctccaggcatagtattttgaggttcttcaattttgctgatgtgaaaaggcattcctttttcttggttttcaaagttgtattgcatttatgttttatttgcaaggaagcatgaacaaaacaatttttgataaacacaaaaagctgttttgcctcattatattggatgacaagtgagatcttacagcttcacatcaaatcagtggaaaaacaattatctgtaaaaagtatgtgcaaacatttttcttataaagctaagattcaaggcaacgtgtctggaatttgtttctccctttaggctgcctccattccatgaaacatctgtctcaatttccgctcttcctggagcctcctttggtctctctacaaatccattccttctgaatctgcctcattctgacctacagatggaaaccgtatgtctttctgtttaagaaaatgtgcccaaacttctcagctggagctttctggtcaagctttattgtatcttcatgtattgctcctaaagtatcaaagacagtataatctgtttttgttttgatttcatgctttaaataatttaaagtaagtattagcacattcactgatttgtctcagaaaatctctaaacatagagctgtgacttagatatattttggacaagcaaagttggaaaaaattatacttcaataagtacttgctgattgcctattatgcttacagcctagaggtacacagataaaagacatgacatactttaccatccagcaggcttggaaatgcagaaaacaaatggaaccaatgtaatacagcacagaaaaggctgaaatagagagactctatggaagcacagaaggatgcacaattcagaaatataaactgataaaagaaagtttagtgttccttaaaaagaataattttcatttgtgatttgcaatgcttttaaatctattataagtgatattaaatcataagtgtattcctaaaattttttggttactcaaacacctagaaaatacctggtctgaaaatatacctgtgttatagatgaaaggaatagtttgcagatcacttggtattaagtaatccagaaataatttatgtgtttctttactttcttaatgaaagcaaataaagaagggtggaaaaaagcaaaaggccatattggtgtggttaagggaaagtctgggatttctggggataccacaaggacactgggccacaaaaagtgggtcctggatgtcgccatcccaattgcctggagcaaattttcagcccaagcttacgagaccgtcagagaagtagacatttactaagtaccacaaagaaatagacattcagacaagggaagaaatctgaaagagaagatttctcctaaatccaaacagtattcttaaaagcaatgattctattacttaaaatgtacaagttagataagagcaaagcagttgtaatctaaaatataatataaaaaaaaacctttgaataattttgtaattttataactgcctcctagtgtcaacgttctcaaagaagtccattttaacatacctagatatcattacaatatttgttattttaataatattgaaaacacatgagaaatggcatatcacaatcaaatcatagtttttatgtcactatatattttattttagtataaaggatacttttcagtaaaatgccattagagacagtataagtcattggtaaggaacagaatatttgaacctaggaaatcaaggattgaaaggacaagataatatgtatcaatttctgctcagttattaccttcaaggggagtagaatgagagctggatggtaaaggggagttttgaatttactctgtacacttctgaattaatgtgaagctttcacaacattgatgcattcttataatgctacttattattagaaaacaataaatgagcttttttttaaacctatgaaatgaacaaacatatacgatattaaagaacaagaagaccaaaaaaaaaaaggcattggaaacaacttctaagatttgagaaacaaaactaattaaaaacaacagttactagaaccatgtgtgttcctccaagcaagcaggatggtcaaactattgaactttagaacatgagtgtcctcttgtggcaaatatgggtacattttaaatttgtgtcactgccacacagagtgactgagaagttggcctgaagaaattctcttttttttttttttttcagattgaaatagccacagtgatgccttcagggaacagagagctcctcactccacccccacagcctgagaaggcccaggaagaggaagaggaggaggaatctactcccaggctgattgatggctcttctccccaggagcctgaattcacaggggttctggggccacacacaaatgaaggtcaggtacctcaaagcagaattacaattgagtccactttgtcatcctcaaaactgcacagcttcaactctacagggaaaccacatgacatgacccaagaaaaaagttttggaataggctaggtttgaagcatatttatacatagattttatattcaaatataaagcagttttaataattcagcttcggtctcataaaaatgatcaaataaccaaagatttgggatgaaaatattgtgtatcattactcgaaacctggtggtggaatgtatttgtagaacagagagtaattgatgagcaggataaaatctttgcctctgagattaggccacagcagttcaaggggataagagatgatgaggatgaagatgatggtaatagtaataatattttgcactaattgagcatatactatctgtggcctatatgctcagcacttcacattatctcattggattattaaaacctccctgtcagagtgttaatattactcttctcattatcatggagaaaaccataattcaaaggggatagtaacttgccagacatcacaaagctgttacatagcaggtttgaagccagcctgttcagattcttggctgtttatttatttaaaaacaggcttcttctcactcaatcctaagaagcaacagagagaggaaaatattgcacaacatcagacaccatgttgcatggcctgcagatgaaaccagagccttttagttaatgagaaggaattcttagtgctacatgtaattctataatatgtccgtatttcttgttcaaatgtgtcactgtcaaccttgggggtactcaagaggactcacactggaatacttttatatacacagagaatggcatagttagggagtatagaaaaaaatagagagttccccctgcaaaggttgagtgaatgtagagtgtctctgtattccaagttctgtagacacaaaacttagtttcaaataactaccgttctcatgaatatttctgcctagcacaggaagatagacatagaaacaaatttagaggcaatactgtatgtattaatccattttcatactgctgataaagacatacccaagattgggtaatttatagagaaaaaagaggtttaatggattcacagttccacatggctgaggaggcctcaaaatcatggtgaaaggcaaaaggcgtatcttacatggcagcaggaaagagagaaagagagccaagtgaaaggggaaacgccttataaaaccatcagatctcatgagacttattcactaccatgagaacagtatgagggaagccgcccccatgattcagttatctcccactaggtctctcccacaacatgtgggaattatgggagctacaattcaagatgagatttgagtggggacacagccaaacaatatcactgtattacaggtcttatgagaaaagtctgtccagaacacattgggagacaaaaagagagggaggagcaatattacctaaggcatgactaagagcaaagtacaggaatcaaaactgagagtttcttggacagacagaggaaccaaaacatatgtattcaaatcccagcactgtgacttgtggggtttttatagtcttgagtaaggcattcaatattactgtgccttagttttctcatctaaaaaaatgggataataaataatagaacttaccttatagaggtgttgtcaggattaaatgaatacatgtagttactggcccatagtaaacatagtgttagttatgaaaattctattgataaaggagttcatgcatttttttctctcaaaatttttagtgtacaatacagtattgttaactatgaatagtatgatatagcagacctctagaacttgttcatcctgtataactgaaattttataccccttgaacaactccccatttcctgaggctctgataaccaccattttactctttgcctctttgagtttttaactgttcttcaataagtaatatgaaaagttgccctttcatcccatgccttctatatgccagacacttgaattgttttatctacattaactttttgaagagtcaaaacactatgtactaggcactgattacccatttttaaaaataagaaaactaaaactctgacatactataaaatgtgtccagtaacacagaggtgatatgtggaatgcaacatagaccaataaatcctgtcagtgtcattaatgaatatattatattctttctgtgtagttaaatttctgtgtagcagaacactctacaagtagaaaaaggaagagacacaatgagaagaaaatgtaaatatccagcataaagcacccaaaataggaaaattaaatatccctagaacattacttatatttaaatgatttcagatccttcaaaagttgaccaatcttgtatcagtacctgtatgttggatctctcagcttagccagaaacaacagaaaagcagaatgcccaatcctttcaaaagcttgagtcaagtaatgcttcactaatgtcaatttagaaacataacaaaaactaagacttttaaagaaaatttttgtttctaaagtactctgaggataaaaaagttaaaaactcaaactcactttttaatttccaaagaagaggcacacattcatcaaaattagtttagaaatatttagaatattaaaaataaaaataccatatttttactactaaaacaaatttctaaagataacattctaaaaccgtgtaatatagccttgagttaggtgtagaaaaacttagaattaaaatataactactgcgaatatatataaattaccctaagcaatcattgcttaattatcaaggtgataaatatatagaagaatcaaatgccttaactcttaaaatttttatgagtagaaaatattaatttataatgattggagaaattagcacgtattaaatattttacagctcctgcttaaacattttttcctggctttccattcttaaaatggaaatgacttttgtatttaatgatagtaataagaccttaatgggtacattattagttcttgattacaaaccacaaacagacctttcaactaggttgatcaaatatcctggtttgtctgggtgtgatgagttcccaacacaagtgtctttcaatgttataaacatgaaagtctcaggtaaactaagacaaattgatcactgagaaatttcaggacatttcttccaccacttttctcttctagtttatgtcatagagatttcactttctccattcattccacagcttacaatccttatttacctcatccctagacccctcaaggctgtcagataacttaacttcctacttcacaaagaaaatgcaatttctcagtcagcagctccttggtcttcctgtttccagacaaataatctacctacatctatatcaatgtgctcttctatctccctctccttctagcacaacaaagacactctgtccttccacaagtgggatgaaaatctttccatgttctttgagttctatttcctactgtcctctcatgatcctttttatattcaaattcacctcctctggatctttttctccaaattccttccatgttaatcactcccttcatcaaacaaaccccaagcatattttattatagatatcactatgtctcatcccttgctcttcacaaacctctcagcattttcaacatttgtggcaacttttcccttacttccaacttctcccttaatggactgtaatctggctttcagctccctcactttgcaaatcttgtaaatgctctgataaccactgcaataactaatccaagaacatttttcagtccttaacttacctgacatctcaggaggcttaggttgttgattatttcctttcccttaaaactctctccccacatggcctccatgacattgccctatcctgattctcctcctttcctctgatcattaattctccatctcctttagaagtttactgtcctctccatgatcactaaacagaaaatgaagaaggggtggagaggtaggggtgtgtgtgtgtgtgtgtgtgtgtgtgtgtgtgtgagtgtgtgtaagacagaaaagaaaaatcagtatgtcaagataaaacccagcctcagaaacatttttggttccattgcctcctctaattgttaccatcttttgtctacactatgattcacttccactttttccagttgccctgcttcagtcttccattacatcttccagcagacttaactcttaccatgcaaaccgcatcgtatgatacctctgcccatccttatgggaaggaataaaagctgtagcacagcctacaaggcccctgcatgttatgtcccatacattccaatgctctctgagttttaaccatatggactatccttcagtccctccaaagtgaaggcatatgctgcttcctctgcctggcataccattcctgtcctacctgcatagtcaattattcctcttctgctgatctcagctcagctttcacttcagagatgccttccatgacttccagactaggtcaaatccccctatgttatgttcagatgacacttcatgacatttatcacattcataatttcatttgtgtgattaacattcatttcacaaagcagatcataaaacacaactgtgttctttgtgctcaccactgtttcaccagctaccatggtgccatttacatagaaaggattcaataatatgtattgagcaactgaatattaataattattatcttttatttttcttgaagcaagtgttgttttagtgaaatgtttcattattaaaccaaagacttaatgaaaatattacatgtgatattttaactttatgaaaagcacaataataatgtttaaattttgaatatagaatttctaatagaaaagtactaattttaaattatttttaaaatgttacattgaatatactaattgttgagacaattttaattggtatgcttgacttgaatattctatttacagaaagcattacgagaaaatataaaatctacttggttagtgggagactctaatcttgtgtatcaaacattccacattatttcttagaaattgatttggtacttacatttaattttattttcctttatcttttagactttccaacctgtcttttgtgtacttgtataagtaccaccgtgtactgtgatgaccatgaacttgatgctattcctccgctgccaaagaacaccgcttatttctattcccgctttaacagaattaaaaagatcaacaaaaatgactttgcaagcctaagtatggatgacagcattaacggccttcaccgctttacacacttcctttaaatttttacattgttaaatgttagcactgagaatgaaacttgaatgccaaagcctggttcatgaatcaatagttttttgttatttaaaaatttgagagtttgctttaacaattataagaaaaacaacaaataagcaatggtcatttcaaaaccatataggtgatgttttcaaatgagcaatttaaactaaatatgcataataaataattatattgtacatgctggaatgttttatcatattatgacattatgagtaaaatattgtggtcatatttatgaggagttggctttttaaaaataaacttccactaaagcatagttgctttatgatggatgaatgtaagcctaaattctgactttaaagttgttgccaacttagaagaattttggtatgtgttgtcataaagtgttttaatcatttgaagatttctttctaatgcctgtatctttgactattagaaaacacaacagtctttatcattgagggaaacattttaaatgacaaaatccagacaaactttatgaagattatggagagaagaccagttattttaaacgtggtgtaccaatttctttgctaaagttatactcctaagtacataaatatgaatagtatttggaggaaataattttttataaaaagaaagataatcatctcattaactgtgcattgctaaatttatatttgcaaaataaaggaaaattacatttatatttttatgtgagcaaaacaagaatatttaattacttcctttatttttttctgctaggtgatttaaaaaggattgatctgacatcaaatttaatatctgagattgatgaagatgcattccgaaaactgcctcaacttcgagagcttgtcctgcgtgacaacaaaataaggcagctcccagaattgccaaccactttgacatttattgatattagcaacaatagacttggaaggaaagggataaagcaagaagcatttaaagtaagttttaagtttgatatgcagacttttatcttccaattttatttgctgtcattgactaccttttttattcgtgtagggaaaataaatttatttatttatttatttatttatttatttatttattgagatagggtctcactctgtcacccaggcttgagtgcagtggtgcgatcacagcccactgcagcttcgacctccctgggctcagatgatcctcctgcctcagcctcccaagtagctgggactacaagatgcgtgtcaccatgcctggctaaattttgtatatttttgtagagacatggtttcgccatatttcctaggctggtgtcgaactcctgggctccagtgatcctcccgcttcggcctcccaaagtactgggattataggtgtgagtcactatgctcaacttctataaggggatttaatttagtgagacttttaactttcaagataaacttcccaactgcatctgtcatgcttctgagaaacaccatattctggtacattgtgagggtgatcaagtaccaaaaacagaaagcagggccagaataagaagttggtggctacctgaagcaccatctacagaagcaccatctacaggagcacctggaagtggtacaagccagagaatctgtattgatcagaccctacactcagaaagactatctggctaaaaggatagctacttggcagggaatgggcagtgtcttgaagacagaaggctactaaatgaccttataaagaggatggattcagttagccttagagattttgttttctatgtgaagcaagcaggtttggggctagaggacttgctttgaaaaacagcatagggtctgagaacagtaaccaactggctttcttgcctcctcttatggcattcaagcagcccctctcagtgtacactgaacatgtaattgtaaaatactctttagagagacaccacagtattctcagggatggcacaggggatagtgtggcctcataaccactgggtggtggcaaatgccctgtctctctgctaggcctccagtgataccatcaatggtagctatgggagttagggcatctcactatagccaggcaagggtcatagtctagtctgcccactctgcctgtgttggcacaggtggtgatgagtcacagtttattctagggtgtttggctagagtagaacagctattgtctaaatgttttttgtcttgctaggctgcccttttctggtagttgggctaccaggccattgctggggaggaactctttgtttccatgcctataaaataaaggaaatgcttgctatgcctcatcaaaatcctcaaaatcccactgcagaatgcctttcataggaagaagcagccttgcttaaattgagaaagtcagactgaacaaaacatggttcttcctagagactgagaaacacattgtatttttatgaagaaatatttgcttgtagccaatttttccaaaactcatctgaattgtctagtaactcagaaaactaagctgcctcaactttacaaaacaagacctgaactggaacatgctattttacaaatatctgcatgtagagggaatgggaaatacagctgtgttttttatttcttattgagtttttattgagtttttattgagttcccacatttggaatgtttacaggacatgtatgatctccatcatctgtacctcactgataacaacttggaccacatccctctgccactcccagaaaatctacgagcccttcacctccaggtaggagtctaccagtaaggtgcgcccaagggcttcagagaaagcaaagccaaaaaggacatcaggacacaagaatttgtctgtaatggcatgttgacacactgtgataacttttcttctttttctcttttctcatttattctctctctttatctgagtacaaagctatctttatacattcatagctctatctattctaattgaattctgataactttactctttttcttattttccaaggcaaaatgcatccttttggtacacaaatcttctttagaaaaaaaaccactgaaagtttcacgtgttgaagaaaatgaaaagattagaagtggaaaagaaaagggagaaataaaaatctaacttgacatttagctgtcaggggaaaaaaaaaacatcagtttcagcctgtgattttaggttttatgtattgaattaaattcagtcctaaggcattcctatgtgctgagagatggcaagctccatctctctggataaacaaagtgcaggtttttttttttttaaacaccatatttgaaagttttggttattttaaagcccattaagctacatgttatctttgaagtattcagtttgattagtttaatgaatgaataatattttattttcacctatgtgattaaaaaattgttcaatcataatgaatatttttggttgttaaatataaattatttcttatttcagttgtaaattttagtttgtagctataatcaacattctctaatcaattgatctgttctatggaataaatatatagagaaaacacccatttcatgctcaaagaaacaacattatagtttaacattatcttttatggcagaaaatgtacaaaaagtgattttgctatttaagagctggacatgaattcctgtgtttccccttgtggattttgtgaatatttacctttgtgccttttctttttttcctattaatataaatattttcatatttttggtgtctacatatatataaatatatatctctatacatatatgtatatacacacactatatatatatatatgtatatatgtctgtgtcttggatatctgtctcttttgtaggtttgtctgatttgtttacttgcctattgtatatgtattttctagccatttggtttgatttctggatggctctctctttttttctgggggtgaatttctatgcatataaagatgtctttccttgtttatgactgaaggaaagatttccaagggagtacttagagattttagaatgtgttttccaattatgaattaaattttattactattatctggggtgatattgattctaccaataaaacaagtctttgatgttatatttaaacataattagtttgtatatataatatgagggaattttttaaagtaacagcttttacattcccattctaagctttgaaagtcaataagtgcaacttaaaatttttttctccgtcactgtcagctcacaacatccaatatatatatgtctgtttttagcttacattgtcttcaacttctgtatttttaatacataaataaatccccttttttattcatttggaaaatgtttgccaacatgtagtatagcagttaaaactgaaggctctggcaaaagcatatgccttgggctgaaattctagacccaaaactatctgaaactccctgcatttctgatttctcatgtggattaaaaggtgatcttctatacaggatggctgggaggatgaatgaaacaatgtttataaagcatttaatatagctactgatatatgataaatacttaaatgtaagtcacagttattaacaacacatatctatcacatatcaaagggaatagcagagttaataggcacaaaacatgtattattcctcattgacactttataatgataagagggttaatacatcagggtcaatacatacatgattataaacatatatgcatctaacaacagaggcccaaaatacatgaggcaaaaactatcagaaatgaaaggagaaataggcagttcaatagtaatgaagtattccatcttcttatttttattttttaattttaatttttttttatagaaagggtcttgctctgtcacccaggctagaatgcagtagtatgatcatagcttaccacagcctcaaacacctgggctcaagcaattttccaccctagtctcccaagtagctagaactttaggtgtgaaccatcatgcctggctactttttaaattttttagagaccaggtctcaccatgttgcccaggctggtcttgaactcctggcctcaagtgatcctcctgaattggcctcccaaagtgctgggattactggcatgagccaccgcacctggccttgcttcaataatggatagaacaactatctataagatcactaagtaaatagaaaacttggacaacactgaaaaccaatttggcataacagtcatcgacagaacattccacccaacaatttcaaaatacacatttttctcaagtgcacaaggaacatttcccaggtagaccacatactaggccacaaaacaagtattagtaaattgaaaataattaaaattatacaaagtatgttttctgattccaatgaaattgcattagaaatcaacaaaaaataaaatttaagaaattcacaaatacgtggatatgaaacaaaatttttcttaatcactaatgggccaaaatagaaatctcaagaaagttaaaaaaaatcagagataaataaaaacaaaaataaaacacattgaaatgtatgggatggagctaaagcagcacttaaagggaaattttcagctgtaaatacgtatattaaaaaagaagatctcaaatctataacctagccttctaccttaagataattgaaaaagtagaggaaactaacccaaagcaagcagaatagaaataataaaaattaaagcagaataagtaaaatatataatagaaaaataatggagaaacaaaactaacatttgtttctttaaaagatcaacaaattgacatatttttagctgatgtgacctaggaaaaaagtcacaaattactaaaatcaggaataagaaaggggacattactaccaaacttacaggaataagaaggatcataaggattactataacaactgtaaaccaacaaattagattaaatgaacagatttctagaaaaatgcaagctattgaaattgactaaagaatggataatctgaatagagctataataagcaaatatattaacttagcaatttaatatcttccaaaaaagacaacccactcccacatggatttactcgttaactttatcaaacatttaaagaagaattcataacaatctttcacaaactatttcaaataacaacaaaaaagagaacatttccttcctaacccattctgtgaagccaatattacccaataacagtactcgacaaatatatcaccagaaaatgaaactacaggccaatatcctttataaatattgatgcaaatcgcctcaacaaaacacaacaaacggaattcaccaacatatagaaaagattacacatcacgaccaaatgggattgcagaaatataagaatagtttaacatttaaaaatcaaccaatgtaatatattaatagaataaagggcttaaaaccatatgattatttcaatagatgtcaagaaaagcatttgacaaaatccaacaccattttattataatattactaaaaaagtaaaactaggaatagaaggaacttcttcaatccaataaagaacatctataaataactcaggctaacatcatcttcaatggagaaagactgaacactttctttctaagaacagaaacaagactaaaattgtttgtctcaccacttctattcagtattgagcctggcagttatagctaggactattaggaaaaataaatacataaaatatagtaaataaatagtttccaaattggaaataaggtcattcttctattttcagatgacataatcttgcatataaaaaatattaaggaatccactaaaaactagttgaactaataaatgagttcagcaatgtggcaggttacaaaatcaatatacaaatatcaattgtatgcaggatatctatacactagcaatgaacaatctgaaaaaaaattaagaaaacaatcctgtttataatagtcacaaaattttaaaggtatctaaaagaaatttaacaaaggcagtacaagctctgtatacttaaagctacaacacattgttgaaattaagatctaaataaagaaaacataattccatattcatgaatcagaagacttacgactaaggtggaaatggtccccaaattaatctataaatcttaggtatagaaaattctaaggaatccactaaagtatttgaactaataaataagttcagcaatgttataggttataaaatcaatataaactatcaattatgtttcaatacactaacaatgaacaaaaacacagtgagataccaactcatactcacttatttggctaaaataaaagagacaattagaagcattggttaagatgcagacaaaattgtaaccctcatacattgttggtagaagtgtaaaatggtgcacctactttggaaaacggtctgacagttcctcaaaataaaacatgaagttactatatgactcagcaattcaacatctaagtatatacccaaaagaactgaaagcgtatgtacatacaaaacttttacacaaatgttaacagaagtatattcataagaggcataatttggatttggaaataattcaaatttccattaattgatgaataaacaaaaatgtggtatatcaatacagtgaaatagtattggacaacaaaaaagaatgaagtaccaatacatcctacaacatgtatgaactttgaaaacacaatactaagcgaaagaactcagtaccaaaaaatttatatataattctacttacgtgaaatgtccagataggaaaatctatataaaaagaaaatagattagcagttgctggggtgggaggaggggaatgtgtggttttcttttgggggtgttgaaaatgctttaaaattagacagatggttgcaaagctctgttaatacactataaaacactgaactgtaccatttaagtgggtgaattttatggtatgtgagatacagtaaataaacctaggtttaaaaatccagtcctgggccctgcttatcttccggatatttgctccctccttccttcccctcacttcagccacattgacttgaatgtcgaatgttgagggaggagcattccatgttgattcctcaggactctaaacctgatgttctctgtgcctagaatgttcttcccttgttttttttccatgcctttttcttcttgtcaatccattctcagttcaattgttacctctaaagataacttttcatagtcatcctattttcttcacaatactcatcatttttggaaataacttgtttttctttcagtagttttctcacctcaaattgtatttctcttactgaagtataagctccttaaaaacaggagcatgtctatttcctaatttacccccattgcttagaaagtgcttggcatatacattaagtaattttgattgaggaaaataacaaaagaataaaaacaagggtgaagcacagtggactgcgctatcaatcaatactaagaatgtgttatatcttgtcataatttattttcatcttttttagaataacaacattctggaaatgcacgaagatacgttctgcaatgttaaaaatttgacttatattcgtaaggcactagaggacattcgattggatggaaaccctattaatctcagcaaaactcctcaagcatacatgtgtctacctcgtctgcctgttgggagccttgtctaatttcagataatggttagcattacgatggctactataaataaaccattcttactgctctcttccaaaacaaaactcagcatgatactttgagattgtgttctgagagatgatatgactacataaaatacaattaaaaatgttataatgaaaatgtagtaatttaagaaaacaccagatgagttaggaataaacctataacatttacaaaaagagcaaaactaagtgatagaaaatatttcacacatgttcttatagatcatgtatcacttgcaagttttaggagttcatatcctatatcatttcaaattaagtacataataaagtaaaattttgaaatgaacactttaggtatttttgccaagatttagatgtttttaattaaacttttctcttcctttttttttcactaaagcatgtttattcccctaatccattaaagagcatgaaaaaaagaataaatgtatttgaaaattataa

SEQ ID NO: 104 - DNA, 127609 bp, Homo sapiens
cacccaagactgtgctccttcattcatccagcgtttattggcatctcctactacctgagctgttttaggcagggaacaaagcacagataagccctcctggagcttacattctgatgaagggggcaggcaaggtatacatagggaggaaagccctggaatccagtacattaaaaacttttattaggattatctctgctgcatttagttgtatgtatcccttatggcccccaggcaggtccactcctgggcattcaagtcggtccatgtgtcaggcgtgcagggtgggtcacagcatctaggagctcagtgcagcttgggactttgggacatacgctccacctctctgagcctcagtctccttgtccatcatataaggaaatcactgattccagccttcctgggctgtggagaggattccctcagcggctgtgaaagagtgctttcttgcgggtcagccccgacaggacagacttaagggcgggagggagcccatcccgcttgccccaacgaacgcgggcgcggggctttcctcgcaggttacataaggcagccgcgggtggaggcagcagaggcgagcgcacgtccgtcgagggggaaaggggcgtggggaggcggccggggcggccggtatcccccgggcgtgagtgcgcagcgcgcgggggagcgcagggcgcggcggagtcgggtttcagagcgcgggtgactcggggcgcgggccgggagccgggattctgcccgccgccgccgctgccgagcgccgcctttgttccctgcaggaagggcgagcgcggcggccagcgctcagcgacccttcgtcctccgctaagctccaacgctctgctcgactagccgcgcgccttccggggctccgcagacccgcgagatggcaccaaggtaagacccgcttctctgcttcctcgcgtcccgggcccctccaatactcttgcccgcctcaccttttctccctcgggcacatcttgcaggaggaacaacgggcagtgctggtgtctgctgatgctgctctcggtctccacgcccctccctgctgtcacccagacccgcggtgcgacaggtaagcaacccggtcggagggtggcaccggctgcctccgcgcccgtgggggaagtcggttttggcggcggacgcggctgcgatgcgtgcctcattcctggacataaaagggagtcttgccactcagtgcgcactggcggtcccgcgggcggctacctcctggcagtgcaggggttatagctgtgaatgggatccctgggcagctggggcggttggagcgttgtctgggcacccgagatgtctgagctgggtgcggagcctccaatcttaggcagagagggacttcagaaacagcgccagcgccagcgccaacagcctcagcgcacccagcgccagcagcttaggttgtgcgtgctggctggcttctggtaagggcaggtctggtgcctctccgcacacaggtgcgaagcatgaacaccgggagggacatctggggcttttgctgctcaagaaataacggaactgaattgctcggttgcttaacccagctctgagttacctaagcggtcacgtctatcatgggcagtggctccaccggtggtggaaagagctgtggcctggaagccagagatctgatcccttccgttccccgggcctcagtttctccagcagaactcaggcggttggctgaatagtaagatataagttaaagtagacctaagttaaaatgggcctcggttaaggtcagactgcctgggtttgaactgtggctggctgagtgatcttgggcaatggatttcatcgctctgtgcctcagtttccccatctgaaaaaggcgattaattagaccattttaccttcctagaaatgttgtgaatattagagaaattagaaataatgtgcttcccatgattccagtatatactaggcacaaaataagtgatagaaattactgcttgattcttgcagtaactatgtgttggaaagcaatgcaagtatttttatttttattttagattcagggagtggtcatgtgtggttttttacaagggtatattgcacggtgctgaggtttgggcttctattaatcccatcgcaatgcaggtatttttataacattgaggttgagagaagcttagaaagtggccagtccaaaagccaggacttgaatccaggtctgtaggctcttgcccttgctcagctctttctccatgcagttttgcagaagagccatgctttctatagcttctgaccccctcccctttgaatttgggggattagtacacatcttcaattgaataagggaacagaaagtctaggaaacaacctctagtcggcccaaaggaaacgggattgagaaggtggccttggttaactctttgtttgcctgaagaagcccaagacagcccattgtctcctgggcaacaagacccaaatccgatgatagcttttcctgccagagtgtccagcctggcatttattgcagatcaaagggcagctggagtatagttttagcttctcagccccatggctcatgtcagaaagttgcaattttgcatatgatatagggccctgccaactcagtggcagaggccaactttgggttccatggtcttttgtgaactttgctgcaacttccagtttcccaaaaggaagatggatctggggataggaactttggtgtttctttctcctcctgtgtgtgtctctgggatccctcagtgtcagggctgttgtttctaacacaaaggaagccctattcccatttataatgtaaaaagggagggccagcaaaccttcaggagctgagaacggtctaaggagggccatttgcaactgatgggttttcagtgcccctttggggatgtgaaacgattcctaaaaatgtaaactatcctcctgcaaactgcatttgtaatgcaatttaatatccctaatacttataaaacactttgtatatccaggtggaggtgtgaacatgttcatatttcattcatccaatccttacaaccactccaggaggtgaggactgagaacagttactatctctgtttttcagatgaagaaacagaggtccaaagtcacaagacttctaagtggctggggtgggatttgaaccagacagtctgactccagagtccttgctcttaaccatcctagtgtgtagttagaagagcttcacggatggagaaggctttaggggttccatggtctccaatgagccccacaatctgaatgtcacaattgtaacatgagtccattgcatggcattgtgcagtcttcaaagcacaatgtcaccttcaccacgtccctggaatcaccacccagcagtgctgagaagtaaattgggctctgtcttacagaggggatgtgacttcctcaaggccgcatgactgtaactgggtagatccataatagccctctcacgtctgtgaacttctgggctggtgctgttccttccataggaccactgcccaactggctataaaaaacaattgccaagacttcatagcactatgaaccagcagtgttttaagtgccctgccatgaatgagctcagtcaatcatcacaacaaccccatgtcttatccccttttacagatgaggaaactgaggcacagtcttttgcccaagggcatgtagccttcagtaatataagcacaatttgagcccagagggtctgactccagaatctgtacttgtaaccactatgctgtatgcttaagtggggtggcttctgaaagcatgtttgtaagtgggctgttatgagcggaaatacatgttcccaacgatttggcagtttcttaaaatgttaaatatatacttaccctacaatctagaacttccactcctaagtatctacttaagggaaaggaaagcatatggccacccaaaaactcatatgtatgttcatagcagcattatttataatgaccaaaactggaaataaagttaaattcaccattagctggtgaatagataaacaaatgaggtgtatccatttaatggaatactactcagcaataaaaaggaatgaagtattgatcaatgctacaacaacatggataaaccttaataccattaagctaagtaaaagaagccagacattaaaaagcaatacattgtaagagtccctatatatgagatttctgtaaaggcagaaccacagagacagaaaacagaagcagagattgactgcaaaggggcatgaggaaactttttggggagtgttctaaaactggattgtggtggtagttgtgcaactctataaatttactaaaataatctaactatacatttaaaatgggtgaattttatggaatgtaagctatgcctcaataaagctgcttcttaaataaaagaatgtattttcccagagcatctaggccccagatctggtggggcttcaaggtggggttcctagccagcctggtacagagctggcacacagctcacaacttaaaagctgctggcctcttagggcattgattctctcagaaaatgggtccagagttctgcctgcacctccaggtctctggatcgactctccctactatccctgaatgccattgtgggcccaggacagggctcctcaggtaggggtagaacacatgcatatgggttttttgcaggtagttgatctgttaaaaagtgggtctttgtaaacttcctgatatcctgcacgccctaaaacagcacaagttcaggtattggaaaacctgggttccactcactgacttcctccatgaacttagatgagttgcttttcccactctgagcctgttttcccatctacgaagtggagaggcaagagtcactcatctctgtagtcctaatttaaaatgttgggaaacaaaacaaaataatatttttctagtttgaggtttgattatttcacatagtttagttcaacaaacccattctgtgctggccctcatgctggctgggtacagaaaggatttgggcacagagctgccccaaaggggtcatagttcacaggaagaaagaaagggccacagacaactgtaatgccatttttcctgaagtcttctcatctaccatgcagaatgtcctgtgtgcagccaatcccatccttctacaccatcctgtttaaagacacacttgtcggccgggcgcggtggctcacacctgtaatcccagcactttgggaggctggggcgggcagatcattaggtcaggagattgagaccatcctagctaacacggtgaaaccctgtctctactaaaaatacaaaaaattagccaggcatggtggcgggcgcctgtagtcccagctacttgggaggctgaggcaggagaatagcttgaacctgggaggcggaggttgcagtgagccaagatcgcgccactgcactccagcctggcaacagagggagactctgtctcaaaaaaaaaaaaaaaaaaaaagagacacttgtcagtgggtgtcacccacatggcctcttgtacctccaatggtcagggttgagctggaggacaacaccaatccttccttttcctggtaaagtttcagggtcattggaatacccaatattttagaagataagggggctattgtccaggtagggatggtggtgtcacaagtaatttgctcttgctaataaagtgttgatgattgcaaattatttgcttatgtttaaactgttttattgtgaaatacaacatccattcagaaaagtgcatgctaaaggtacagtacaatcttgtatcacagagcaaacatgtaatccagatgaagatataggataatccccagaaggtctcctaaacccctttgctgtggttttattttcccttctttctctctgaggtaaccattaccttgacattaacagtcatccctttcttgctttttaaaaatagctttactatctaagtgtgtatcccaaaattctgaagttctgttttactcgattttgaactttttaaatgcagaatctattctttcatgtctgattctttcaatgaataataagtttttgagatttattcatgctgctgtatgtggctgtagttcattgccattgctgtataatagtccattgcattagcatagcatatgttacttatccattcttctccaacatttgggttgtttccattttgggctaatgtaatagtgtcgctctgaacattcttgtacatttctctcagtgcacatgtgcatgaatttctgttggttctatacctacgagtggagtgctgaatcagagtgtgcatatcccccaactgagtagacaatgccagcatgtcttctaaatggttgtacagatccacacagctaccaagaaatgagggcctccatttcttcacatcctcaccagcacttgatcttgtcactgagcttaacttcagcatttctaatgggtgcatatttgatcttactgtagccttaatttccattttcctaattattaattaccttttcatatgtttattgaccatttagatatccagacttactttttattgaggtgaaatttacattatataacagtaaccattttgaagtgcacaattcagtgtcatttagttccttcacaatattgtgcaatcaacatctctatcaagttccaaaacattttcatcaccccaaaagaaatatctatgcccattaatcaattgctccccattccctcattttctcagcttcaggcagtcactaaactactttctgcctctatggacttgcctattctagatatttcatgaaaatggaatcatacagtgtatgacctattgtgtctgacttcttccatttaacataaagttttcatggttcactcatgttgtatcatgtgtcagtacttcatgcctttttatgactgagtaatattccagtgtatgtatataccaaattttgtttttccattcatttgttgatggacatttgggttatttctaccttttgttttttgtgaatagtgctgctctgaacatttgcatacaagtattcggatgcttgacggcctgtttctacttctttgcacctaggagcagaatttctggtcatatgataattctgtgtttcaagtatgacgaacccccaaactgttttccacagtggctgcaccatgtttacatccccaccagcaatgtatgagggctttaattatgcacatcatcgccaatgcttgttttcagtttttaaaattatagccattttagtggatataaaatggcatctcattgtggtttttatttgcaattctttctttctttcttttttctttctccttccttccctccttccttccctccctcccttccctccttccttccctccctcccttccttccttccttcccttcccttccttccttcccttcccttcccttccccttccttccttccttccttccttccttccttccttccttcctccctccctccctctctctcttcctttctttctttcttttgacagagtctcactctgtcacccaggctggagttggtggccggcccatcttggctcactgcaacctccacctcccaggttcaagcaattctcctgccttagcctcccgagtagctgagactacaggcatgcccagctcatttctgtatttttagtagagatacagtttcaccatattggtcatgttggtctcgaactcctgacctcatgatccacccacctcggcctcccaaagtgctgggattacaggcgtgagccactgtgcctggcctatttgcaattttctaatgacaaatgacgttgcgcattttttcaagtgcttcttggccaccatcttctctggagaaatcctgatttaatgggaagcatatgaatcagagcagcgcagaacttccctctaaccaccccactcttgctccctggcagtctgatttgcttttctgagtgagagagatgtgggtaggagtcacacctgaagttttgcctcattgacctgcagtctccatctcccaaaggacaattgtctagagctggccactttgtccagagctggactttagcaatttgtcattattataaatagtgctgctgggacatcttcagacaaatggcctttttcttttggattatttcctttggcaatatttccccccaaagaactcacccatcaaagaacagaactggttggacagttcttactatgtatttagatggatttttcttatttaatcatgatgcttcctagtataattgccctcactgggttctcactgtacctgagatggagtcatgctcctggccccagaggaccctgccttcctccactaacactaagtccctatggacttcagctcacatcaaatcactggcaggcttctgaatgggacatgcaacgtcccacacctgtgcttttgcataggctagtgccatttttattctattattattttttgggacagggtcttctctgttgcccaggctgtagtgcagtggtacaatcttagctcattgaagcctcaaagtcctgggctcaagggatcctccttcctcagcctcctgagtagctggattacataccctcatacccagctaatttaaaaattttttgtaggcatagagttttgctgtgttgcccaggctggtctaaaactcctggcttcaagcaattcacccttcttgacctcccaaagtgctgggattacaggcgtgagccactgcacctggctaccagtaccattttaaaaatgcctttcccccatagtacctggggacccccaaatcatccttctaagattctactctgggaagctgtctctcctctcccaggcataatgagcatctctttgtctcagggcttctcagactgtacagtgaccactgattagttgcctgcatccctaactgctacataggaagttctatgaggcagggatgggcctgtccaactctgaatcctggaacagggatttcaggtgcaggactggcatgaagtgggtactcagcatactttttcaatgaatcaaagaaggaatgaaggggttagtctagcctgtggtctaatgcaccaacttactatgttctctgtggtgtgtaagtcattccaattcttccatggctttgtcagctgtagggtgaccttgactgagtactcagggaatattatagggctgtcgttttcttcaatagtgtaataactagttaggctggaattcactctaatgttaatttgctctttatctttcttattatattaattggataaaaatttatttcccagcttctctctactcatcttattcctgattgcctcagtttgtcaaaagttgtgcatttatcttttttcttctagctaaatatgtaagttgattttccagttttcttttgatatctacagcttgatcacttaaaatgaaccatagattaggatataatctctcttttttttaagtctctctatgttgcccaggctggtcttgaactcctgggctcaagcaatcctcccaacttggcctcccaaagtgctgggattacaggcatgagccaccacacttggccagattagggtataatctaaagccagttcttttccaaagtggtccccaggtttcccccaagtactaattaaagtgtgagctattgcctcatcactgtactgcccatcattgttgtgtgatatcttatcatataatattttttcttttaatgatatacttttatttctggtatctctgtattactgatcactttcttgtgctaatatgtgtatgtcgttttaaatccatacaattttgatgcttgttactttgtgctatgttttacagtctggtaagagaagttacccctgcctacctccttcattaagccacgaattctttagtataggttggcttattccataatttctgcatggtatgattagataatgggagtgtaccagtggtagtgggtaggtgagggttgtaaaaaggaggcaatcttacaataagactcaatttaaggcattaatgtctagtgtggagaatggataagcaaataagacctcaaagtcagagcatcagattgtggggtatgacctattgctgtcaacaaagtgcccaggggagctaaggtggtatcagaggtgttgggaggagccaggtttgctgactgattaccttcttctgctctatccaaactacagagaggaaaagtctagggttagagcagatccaggtcaacatctaatgagagagacaggggtccctggtcacctaatgaatgcagcccactctttatccccattataaccaaactcaacccaacccaaccctatccaacccaactcaacctaatccaattcaacccacctaatccaatacaaccccatcaaactcaacccaatccaacccaacccaacctaatccaatccaaccaaacccatcccaacccaaccaaatccaatccactccagttcatatttgttgcataccatgggtggtttaaaggacagaacagggcaaaaaactattctgagggccctggtatctctcccaagtgaccagggcccctgaccttagatgccagggaacccctttctgggtttggagagcttggctggagtctggcttgcaggcaacaccctggccttaggcctctctaggagttactcctcccatcactgagggactcaaatggggcccagcttaaaacactcctcccatctaggcagtcttttgtgactagcttcctcccaaagggaatttctgttgaagtcttcaaaatggtctgtctgttctgtattatggcttctcttacagatgtctgtcttcctcctattattcctggcttcctgctgtcccaggcactctctggagtaggtggcaggatggctgaagagccgcattagactcagtgcccatcctggagggactcatagttcagtagtagagacagtgcgcagaagctggcttgcatgctaaggagcttgtcctgagtttcctaacacagtgtaagcaagcatctgcactgccaaagtagggatgtccatttccaccaggagatgggagaggcagagggatgtgagaagtgtttgtaagagattcatttttttcaataaaattttaaaaattggtaataaaaataatacatagttattataaaaactagggccaaaaagaggagtttaaaaagatcacatattatcttgtgactcaaagataaaccctgctagcatttgatggactgtgtttcaagtttattttccacccctaagtatgcacatagatcataatatgaacagaacattctgtacattgcatttagtgtttagttgatggcttttttcccccttaacaatcatctagacaccttctctggaacattaaatactcgtctctaatattttttgtgtttgtaatagtatttcattgtttggttgtcttgtaattaaacttttaggctgtttctcattgctcactattatgaacactattgtgacgatcgtagtcttgtagctttgtatttgacgacttctgcaattatttcctagcacaacacaatttcctaaaacaaatagttgggtctagtgcatgcccatttttaaggcttttgttgcattgttcagacaggcaataataatttatactccctgcaacagcatatgagaacgccaagcccaccctgccttgtctattactgctgtgtctctaacccaaaaggagcaaatgacaacaggtaaaggaacagtgccaccatccttctccaaatggtggccttactcaaaagagctgagggctcctcccaccctccctctccactcttctccttcattcatccattttgcacatgtctgtggaagggctagaagagggtttttcaggaaattagaatgtgagagctcatgtcatgaggaccttgatggtcatcaggcctccagtaccttggaatcattttggggattccaagggggcctggtgcccagtcctccagctcttcagggattcttcatacatctgagataaggtccagacaccagcaggtttgaaaatctcctgggtgcagtctaagatgcagccaaggctgagaataaccaatgcagtccaactgcttcctttcaaaggtggtgatgctgagtcccagagagggactccttgtcttccttatctgtaaattagggcaattcctactctaaggattagtgatcgggcctgtcactggtgatcagttcaatgcctccttacttccctgctcccacatcactgtgggttccttgagggcaggaagccgtttttatttatccatgtttccccagcatctgacatggcactaaatggacacaatgagcatttgaataagttaatgaatgaatcattcaaagcctgggactgtggagatcttagtgaaaacccagcattatgaacctttgaccagcaaagtctatgtgcgcctccagccacactgaaagaccaccctgcagccatccactgtgcaggatgatggggctagagcagggtgagagtaggcactgcctatagtatgtatatcaagaatagaatgtttcatgaaagaaaagttaagctgtgctttttctggcataggaaagttacaaccatttcatctcacagaacatagagtagagattctagctgatgacaagctgaacccaagttcttgcaagttcaacagcattacacacagaacctctgaaataggcccagccaactgcttctcctctccaactacaatcttagtggctagctagttctgacttgattgtctagctcagagaaggaaagtgactagctcatggtcacagttcaagttggcaggagagccaggtctagaaccaggtatcctgactcctaggccagtgctctggtgcttcacatgaacctaagaaaataccaagggtatggctggggtatggtggctcatgcctataatcccagcactttgggaggccaaggcagatggatcacctgaggtcaggagtttgtgaccagccgggccaacatgacaaaatcttgcctttactaaaaatacaaaaattagctgggcgtggtggtgcacgcctgtggtcccagctacttgggaggctaaggcaggagaatctcttgagcccaagaggcagaggtggcagtgagccgagatcatgccactacattccagcctgggtggcagagaaagtccccatctcaaaaacaaaaacaaacaaagaaacaaaaaacaacaacaaccaaaaaacagtatgatctgtgctaataattatatagtgctttttatgtgccaggtgctgttttaagttttaatatataggatatacatatatgttatatatacacacatgcatatccacatacacacatctgtgtgtgtatgtatatgttttatataatatacattttatatgtacatttacatatatgtatgtgtatctgtgtgtgtatttcatatgtgaaattctcaccacagccttgtgaaatgaagaaattcaattacaacttgacatcagcacacaggtctgtctcccagcctccatcctctccaccctagaatccatcctccacactgcagccacagtaatcttctagcttcttgccactcaatcttcttgcttctagcatcttgctacgtgtggtccatggaccagcagcatcagcataacctgggaacttggcagaaatgcagaatctctggcttcacccccagaactcataaatcagaatcacaccatctaggggactgaggatagcattttaacaagatcctcggtgattcgtgtgcacttttaacatttgagcaacactctaaaccagctctgattgtgttgctccctgcttaaaaccctttgccatcttcccatgatcaccatctgtggtaggcagggtcatggccctctgaaggacccacagcctaacccccaggacgtgtcactccattaggttctatagcaaagggagttaggctgcagatggaatcaaggctgataatcagctgacctcaaatgagggagattgtctccgattatctggttgggcccaatatcatcacaagcgtcctcaaaagtggaaaagggaggcagaggaaatcagagtggtgtgatgtgagaggacttgagcatccttgtttgctagctttgaaaatagacgaaggggccacaagccaaggaatgcaggcagcctctggaagctgcaaaaggcaaggaaactgattttcccttaaagcttccagaaagaaccatggtctgctgataccttaatttttatctcagtaagacctgtgttggacttctaacctccagaactgtaagataaaaaaacttgtgttgatgtaagccactaagtttgtggtagtttgttatagcagcattggaagataaatacagccttctactccttagtgtggcatttgaggccctctgaagttccaccaagtgctgtcctggcctcatctcccagaatatcccttcccacaccctaatctcaaaccaacagagtctccagagtagctagagtatgggaagggacactctgaaaaaaccagactagggttatttctctctctctctctctctttgtgtgtttgtgtgagacaggttctcactctgttgcccaggctggggtgcagtggtgcaatcacagctcactgcagccttgacctccctgggcttaagtggtcctccagctcagcctctcaagtagctgggactgcaggtgtgcgccaccatgcctgaataatttttctatcttctttttttttctttttttaagaaatggggtttcactgtgttgcccagactggtctcaaactcctggtacaggcaccatcacacctggctggggttgttctctatgccaccagcacctagccctgtgcctggcccctggccagtactcaggcaatgccttttgaagtaataacccagtggaaccctgttacgttcaggtcgccaccagccacggaggagcccatgacatgccggaggcaactatggcaacagtgcgggacatggtggagactctcccagagcctcagccttaacattcctttgctcttcttctgctgtgggcaaatcactgtacctctctgggcctcagtttccccatctgggaaatgaaggggttggaaagacaattctaaaagcatcgttagcatgaacatgctaggatatctgagttcagtttggccgcacgttctggcagttgggggcagtgattcggctcagctctgctcagccctgttcatctcactgctgagcacatcctgcactgtcatcccattcacaaagtgggatacaaaactgcccagcaactgtgtgtatttggtacaaaacagactacagctgctcattccccctgtctagttaaaatgccaaattactcactctcccacagaaagaaaaaaaggaggggtggaagaaaccatttctcactgcagagtttttccatgtgacatattttctaattttatttcaggtctaactgtctgcagtagatggctccatttcagggtcttcccctccccttttagtatatgagctttcattaaggaatgaagtggctttatttgtttaatatttgcaagtgtgggctgatatcaaattgcaactgaatgtcttcattttctcggcggagggaagttctctaagatgccccgcactggtttagtggctcggattccttggttctaggcctggtcacaggagctttgccaagtcccctccattctctggacttagaaactcaaagtgagtattccgcaaagtgaggaaaaggctggctcatcacggagatagggtggctggattggaagccatggctgatgcgccccatttctaagagtggttccatttgagactgtgttggaatggtatgcagctcagtttatgtctgtgctcagctcctgtcatctctgcactgttgctttagttcatggaatggctgagaaatttttcatacctggaaagagtattgtagctttgttttaaagaaattaattctggccaggcatggtggctcacatctgtaatctcagcacttcaggaagccgaggtgggaggatctcttgaagccaggagttcgagaccagcctaggcaacatagtgagaccctgtctctacaaaaaaaaaaaaaaaaaaaactaaaaactaaaatgatctgggtgtggtggcatgaacctgtagtcccagctactcaggaggctgaggcaggaggatcgatcacttgagcccaggagaccaccatgcctggccagaattagtttctttaaaacaaagctacagtactctttccaagttatgaaaaatttctcagccattccatgaactaaagcaacagtgcagagatgacaggagctgagcacagacataaactgagctgcataccattccaacacagtctcaaatggaaccactcttagaaatgaggctgcagtgagctgtgattgtgccagtgtacttcagcctgggcaacagagtgagatcttgccataaaaaaaaaaaaattaattctgcccctgcaatgtctgttgcatgcaacctctcccttctatcttcttgccctgcctggcttcaggcctgtgttacctctttctgctgggttgctacagcagctccctggccagcaggatctcccatctctctgtcctctagcatggcttctcactgtgagtcagagtagcttgtctaaaacacaggtcccatcatgtcacatcccctgtcaaaacgcttccatgttttctgtgacgcacaatgcattccacactccttgggttgcagttcaaggcctcttctcctctcacatccctccccgtaccctggctctaccaccctgaactgcttgctggtctctgaattgaccatgcatgttcccttctccaagcctttgcttgcgctgttcctcagcctgccctatggaaatcctctgcattttcaccttgatagacttgttgcttaaactgtggtccctggaccagcagcatgggcatcatccaggagctcattagaaacagagtcccaaggccgggcacaggggctcacacctgtaatcccagcactttgggaggccaaggtagggtgattgcttgaggccaggagtttgagaccagcctgggcaccatagtgagacaacatctctataaaaaattagcatgatgtggtgacatgtgcctgtactcccagctacttgggagcctgaggtgggaggatcgcttgagcccaagaggttaaggctgcagtgagccgaggtcacaccactgaacgaaccccagcctgggtgacaaagggagactctgtttcaaaaataaaaaagaaaaaaaagaaaagaaatacaggatcccaaatcctgcctcagacccacaacatcagatctagacccacagcatcagatctagacccacggcatcagatctgtaccttaaccaggcccccaggtgatgtgtgtggcactcaagtgtaagctgcagtgctgtgtagcttggagggcaagtgctgaatctgggcagtcagatagagctggcctggttccaggctctgcatgtatcagttggtgaccttggacaatgtactaatccttttgaaacctcagtttcctcatctgtagagtgaggaaactataaacgaaataacgccccaagctcttagcacagtgcctggcacatggaaagcccttaatgaaggggagtggccagtaacaaggttccatctcagtgctagctgatgttgtgcctaagctgtcctgtgtcctctctcagcattgcttgtattgggtttattccatcagaggtgagaactcatttgtaagtccatcttgctgaggatgggaagggccaggaccaagtcatttgtgtttggagtttagaatcattgaccttccagtggagggagataaacaatcataatctgatgtggggaaagtgaaacatagctaaacaaggactttgcaaagtgggtgggatggaattcattccagagtttctgcccttggtagaaatggccattctgcctgttgtaacctgggggctttctcattcatccatttgtttacccacttttatgtaatatgtattgactgttctctgaatacaagcaatgtgtgatatcctgggcagaaaatgaaaagcaagataggcttgctgcttgccctctaggatcctatagtctaatgggggacattgatgctaaataaaggattgtacaaaaagactctttatgtttataaatggtagaaaatgttagaaagtgcaatgagagctatgaaagcacatgccaggacactctcatctgtaccagggtgtcaggagagtctccccaaggaatgggatttaagatgagatctgaggggtgaacagatttagccaggaaaggaggtggggatgatgggctggaagaggagtggaatgttccagatacagagaaacagaatgaggagaggatggaagagacagcctgaatgtggctcgaacacgttgagggaggaaggcagggtgaagtttctgggatgaaagcagggccttcgcccaggagccgtttttcctagcctggccctgggggagcatcttggcttcccaccctcggtcagtcctgcagcactaccgcccagggccacccggggtaaaggcctttggtctaggtagagtgcagtcaagccctggattctactacctgccttgctcctgcctctgcttatcagacagtgaattgcttcagggcgggggcaaagggtctctacctttacatagcgtaagagaagagaatttaagagacttgcagtaaaatgtcaggaaggcagagtcagaagaaagcccggagccagcacaaagagcccctggtccaccttggcctctcagggcctcccaggccacgacagctgcctggcaaagaggtggtggaggcaagtgaggaaggtttctaacaattgctgtctgcggttagactccagtcagtcctggctttggaaagcttcctcccgtctatacaacgaagaggtcggaccagcgctaaggtcatccaggtctgacatgatctctttttattttttatctctctctggatctctgtattgagaatgtgcatccgtaaacataggaagaattctcttgccagggaacagaaatgcggtttggggaggaataactcgggtgggaggtttttagatgctttcactcaggggagcaattcctttagacatggttgtacccgtgagacgtgggggatgcattacgcctctcctgtccaagccattcctttggagacctgcttctcaaatgggtgtgctcacagtccttggctgtgtgacactagcatgcgaagagccacattgtttatttcctggaggattttactcagtggttggtaatttgtggtgaggagaccagtaacaactggggaataatttggaacatttttatattattaaaacaaacacacacacatgtttggagtggaattcaaaacttaagtgcttttaaagataaagcaagagaattaaattttcaaggtcctggggggctctttggctagactcaggccctcaggtttatctgatgacagagtgctttagcagagatgatgttatatacagatttgaggtccccaacttgtgggggatatttagaattattgcaaaggatacatggacattttctgtctacagatacctaacacctgtgtgttgagggggctattaatgctttgatattgacaagatggagatggtcactgccctccaaagctttggattagaactgtcagctccaagagggaaggaacttgtctatcactgctggatctccggcacttagaatagtgcctgctgtacagcaggtgctcaataaatgcttctggaatgaatagaaatgtgtgtgttgatggccatgagaagctttcatttctccatccacgtttacctttccaggaatagcgtgtggagctgctttagcatggagatcttgggtggaatgtgaagaatgctgtcatgcatatgcatgtgggaggctggtcagccttgctcaggttcaagatttccaagaatcactctttggaggcagccttccacccagcgtggtccatgctgcatagcgtaggctccttgtgtgagaaggcacagttcaccatttatgcaccttaggtagctaggacccactgggcctcacttctcacaatgcctgcaagtccccccaaacaccttactcccatcagaacccactgggaacctgaggcctcagaaaatgctggactttggggatcaactattccagctcccccaaattgcagacgggaagatggaggttcaaagagagcaaggaacttcctgggagtcacacacattttagcgatgtgactcccaacaggttccttgttctagaactgggtctggaactacgtcttctgatatccaggtgggtggcatcactccattttgaaattccccagtgctgcttgatcacatccgtaccattctcagggatgtgcttgacagtagtgtgtggttagagctgagctttggaaacatcacatgaactttaaatcctggttcaacactttttttaattatgtgacttgggcacattgctcagaaagagtgtgggtttcctcatctggatggtggtggtgggtgatgggtataggagtcctacctcctgaggctatatgagctactcagcaggtaatgcccaggagtgctcagagccagggatggggaacccagtgctgagccatccatcccacaaagttaaggtcatgcccatcccgttcaccccaaatctccatgacttgcagtgccaggcatgtgacggtgtgtgcttgatagtcatttgtgaatgaacaaatgaatgaatgaacaaaatggacagaatatgcttagcacctgacatttgccctgtgccaccaccctgagagctaagtattgccacctctatttccagataaggaagctaaggctcagagaagttaaagaacatgcccaagatcacctggctagtacgtggctgagcagggacttacatacaagtttctctggcatcaaattccacgtcctttgccctgcaccattctgggggaggctggtcctcctggggttcccccgaggtcacctcccctcccacccccccattcttggtctctagttaggaggtgtccactgggttttcatcttggaaggtctgattccctctcccattattctggtggtccacaggctgttcctccagcaaacatttggagactgtcaagctgtactttcatctaaattaaacaagagtcagcctgtttcaaaatatgacttcagggtcaccatctgttctggctgttcccttaaactcaaatcccattttggagccaaatggggctccagcatcccacagagagtgtgtctctttgcacaactgagcaggaaagtctgtagaaagacacagtgtgtttgacaacaaccctcggacaaatttctctggttatttcttttcccctactcagcagcatcaacgtcattgcatgtgaaccacaggtccccaccacagattcaaatgcattcctttctacattgggtacctagtgtgtaccaagctctgtatgaggccctttcccatgccatcttccgggtcatgggagagagtggcctggatcttacagtggggggaatacaacatgccaaagctgctcgagctggtcacaccatcagtctgggcatcagttttctcatcttggggacattggactgggtattttctgaggttcttcccagctctgaaggttaccctgattcttcatcagcgccttggccaatgtaggcgagatttcacggtgcccactgaagctatgagctcgttctgactgcgctgcttgtctgccctggctgaattcacacaagctcatctgttgggacgccccgggctgttcccagggcagcttgattttgcccagggcataacatgccaagtgctgagaggctgcaagaaagtatgtctcctgctgttgccaaactatcgccttcgcaccacattccagatcacccaattccaccctctccttggcaagaaaaagaaaggggacccaactgcctagggcagcagcttggggtgaaatgaggattcctcctaaaatggtcagctagaaccttcctcaggaatctgccaaggcacccggttgcctgttgcataaattttagtctccttggctggacatttgaggctctctgactccagtctcctaaaggaaaaagaattgagagtagcaagagctgggaagtcccaaccactgcagttaaggcctgcagtcttaagctccttcagcttcagtcatctcatctgaaaatggcatagccacagtccccaccccatcagactgccttgaggttaggtgagctaatgcacctaagtgctgagctcagggttggcctgttgtgagattaacatttctaagtctgaatctctctggatccataattctctcctttttgctccaatgctggaggctatctcggggtcccatttctcccatccttggaatcactcacttggcccttgttttcctaattgtgtgggtttgctcatgctctgctcactccactgtgttcacctgtgtgaagcatctcaggcctatctccactggcccttccttcaggtccccttcccagtgtcccccagtgggcggggagtgctccctctttaagcccctacaggactttcctgtcctttgcttatggctccaagctcaggtcacctgtatctgggccccgtgttggtgtctggtcctttttttccaggggacccaattccttgtcctcttgatcccccagagcccagcccaggtcacctgtatctgggccccatgttggtgtctggtcctttttttccaggggacccaattccttgtcctcttgttcccccagagcccagcccagcgccaagtccagacagggttggaaagtggatgctggttgtggacaaggccagactgggcccaggatagaatgaatgatagtaaggtcccctcctgactcttcttctgggagggaagagagaggaccattctcccctagggagatgtaaattatggctgccttgaggcctgtggataacaactcaagagatttcattgaccccatagtatcaatcatgccaaagaaatcaagaaacaccccaggccatgtttcacttagagaaagacttagaaagctcagaattaaaatactctttcaagctcctcctatcattcagtgctcctcccaacccaatgctgcacccccatggaggagatggggggccttctccacacaggaggaccagggatcttaccgttctgctcctgggatctccagggctggcctgtcccatcctaccttgccccatggccccagctcatgctctgacacccggataggccatgagcagcctccctgaggcctctagccaaacctcaaggaccctaacagtatataacagagaaggggaagcccggttgttcacattctccacccagaccatgttgcagaggggaggaagatggaggcagctggaaatgagtctgaagtctgagaagccagtgtgtttaagagagtcactctcatctcagtgaaggagagccgagggcagccattttgcagaaggctgctcattcaaagcctcctgcttagggagaggggattgcagcccccagcaaagctacaatcgactctgtgtggttattaatattatattatatctcaacagtggggatcaggtgagagctaagctattaagtgcatattaagctaaatggtgctggtgggattacttgtgacaactactggcattcattagaattctttatgattgatgataaatatgatgtgttaagacaggcatacaatcacgctagtctagagtccattaagctcattcattcatgcacatgtgtattatttgtacattcattcgttcattcattcatcaaatgctcaatttatgcctacttcaggcaaggtctcacattagggagatgagggtgacactgggagatatggagatgaaacagaacatgctacctacctcctgaagggctcacaggctgctgagggacacaggtgaggaacagataacagagtagtgagaaattggagctttctgtgaaactggccctggggtggaatgggggttcctagggagatagtatgactcgtagacctggccaccgcagtcccctcctggaaggtgtgtgccgacccttctctgtactgactttccctggggagccacagctctgttggagaccacaagtttccccctgcctgcagaaccctctcctgacaggccttgacccagggggctggagtgcccaagcctctctacatccacttacctccaggggctgacttggacaggcttcctgctggccagccttcttcccccacagctggggccacttggctgcctcaccccaggccctaggacattcctgttttccatcagtgggatctagtgattcaggggacttagcatcccaacagcctggctgggaggtggcttgaatgctgtgctatgatcacagaaaagcgctgtctctaccatctagtactggggccctgcctgggttggtccatggtggaagcagttacaatcctgcccctgcaccctgtgcctgggtctctggcccctgcaccagacgtctgtgctgctggctgcctgctcttgtctccaggtccatgactgcccatgactggcctccattcaggtagtaggatgccatctttgcctcaacagcacagcagttctcaaactagggtgtgcatcagagacactagggggctggttaaaacacagggtgctgggcctcagcccagggtttctgattttgtaggtctggagtaggtctcgagaatctgcatctctaataagtccccagatactgctgctgctggtccagaaaccacactttgagaaccactggcgtcatggataagcagacgggctatggagtttgaacccaggttgtctgggtccaaaacctggcccagccacttgctagctgtgtgacctaatccctctgcacctcaacctcctcatctataaaaacaaaggtaataagaacaccctcctcactgttactgtgagtattggatgacccagtccaggcaactcacttgcaatcgtgcttggacacagcacacagtaagtaagcattcagtgaatgtgtgagtttcctagggctgcggtaacaaacgaccacaaactgagtggcttaaaacagtagtaacttatccttgtccagttctggaggcgagaagtgtgaagtggaggtgtgtgggctgggtggcactcctcctggggctctagcagggaatccattccttgccactttcagcttctggtgactgccagcaatccttggcttgtgtccacttcattttaatctttgcctctgtggccacattgcctcttcctcttctgtctgtcaaaccccctccatgtgtcttataagaacacctgtcattggatctagtgcccacccagataatgcaggatgatctttttatctcaagatccttaacttaattacatctcaaagactctaaatgtaatgaacatatttagaaatgaggacatggacatatcttttctggcggtcaccactgaacccactttagggaacacaggctattatcattattaagttgttccttcagctcctgcagttgggcctggcctatagcttcctgcctgggggcgggggcggggaaggaggagtaagctgactcccaggttccagcttctggtcagctgcactttattcaagacaacccattttcaggctggggcagagaattctgcctattaagctatactggctatgttatagcatttcagcatgttcagatttcattgatctgagaaaaaaacgccaatcccagccccccagactcctgtctggagccctttgtccatgttaattgttcctcataccctggcaagttgtacttggcaaagcattttctcattcaaaactctactggatcctcactgcagtctcatgagaaagattgtatcaccctattttgcagaagagaaaactgaggcccaggggaaaattgcacaaagctgcctttcatggcaattctaagcagtaatttatgggagagaaaagaaggctaatgtcactgataatactaactaccaccaccgctatgcttcattcatcgtgggcctttgcttggccctctgctcagtgttttatgtctattatctcaggtcattctcaaaactctctcctgaagtaggtagcattcctcttgcggatcgagaaactctggctcagagaagtgaagtatcttatccaaagttgcccatcttttaaatgcagagttgaggttgagtctttctccctaataccaggttgctcagagatccgtctcctagctctgaaaaaatgtcagggcagaccagaagagaacagtggctgcccagtggccagcaagactgtgggagaccccctctcgttgtcagcagagccccgctcctggtagctggtagggaggtgcccagtgttgatgcccccagccatagggagggagtcagggcaatgggaatagagaggcagatgggcccaaggtcactgagggctgggacaacaataagggtgtgcttcctggagtgggtcaggcttgggttgaagtgacattcctggagagcagcagagacagactcaatgcctcgcatcagacagatgagggcttaaaatctccagtctgggatttgatagctgggtgcccttgggcaagttatttaacttcccagtgcctcattccttcatctgtaaattgggaacaaaaagagtggggttgttgtgaagaagtcaggggctataattagcatcaactgggaagtttgtgcagcctccccatgcccaagccacacctgaaccagctcaatcaacatctttgggagtgaggcaagagcattagtagtttaaaaaaaaaaaaaaaaaagtctccccaggtgattctactgtgcagccagggttgagaaccaccgctatgcaagtaaagcacttcgtgcccaggacatagtaagggctccgtatacaggaactattgcccattcactcatgcacaaaacaaacatttattgagcacttacctatgccaggctctggattacatgccaggcatcacctgttcacagcagctgtctgaatttatttatgtactatttctagatagcttccaatagagggatcgtggaattcagtgctttgtgaagccaggaccccaagtccataattctagggagaaggttttactgacaacgaggaaaggagggaaatgcagaaaatgtacccaaatcagagaaaccaaaccctgtgtgtgggaagagcagtctgagctctctgagcccttaagggggtagcaggagaagacagtgtgggcttcagactttctgtgggctcctctgtaaatatctgcccctacaacaccccagcttccacagctgtgatgtggaagggctttcaatgattggtttgattgtttttagcctcagaactcttcattcaaatgagacttaatggaacccaaattattaaacaaatgaagtctgaattgcttgggtgtatgtatatgagtgtaggtgagtgtgtgtggatgtgggttagtgtgtgggacagggtctatgaataggttgtgagtgtgtgagtaggtaagtgtgtgcatgtgtcagtgtgtgagtttgtatgagtctagggtgagtgcgggtggaggtgcatgagtcggtgtatactggagtatataaacgtgtgtgtatttgtatatctatgtgttagtttgtgtggcgtgaaccttcgaaagtatgtgtatgagtgtgtgttatgagtatgtgaacctatgcgtgtgtatgagagagtggtaagaataacagatttgtactgtgtatttgtggatgtatccgtgtgtgcatgtgttcctgtgtgttagggggccaaggggcaggacttctgctaaggcctcctgtatcctcctccctttctcatccccagccctggaaaatactgcttgaaaccccctggtctatgtgtctacactggccctgccagcagtcctgtgtcgccttggaatgctgggcctgacggcttccaggagccatgggctgtagagcatccatgtccagcaggtcactgcatgctcccatcccatgcccctcacgtgcccctgacaggcccctttttctccgtgccattttccatgtgttttcctcccagagccctgagctgagccctccagagctgcctgccgggtgggggtgatgactcatttcagttgatgtcatcctcaggattcaaggctctcaatgcactcaaagagtctttgttccccaaatggaaaaggaaagtccgtacaccgagaagagctgacaacgaaactcttcccagatgcccatgggtgctcacgcctgcccgcacctgctggccttcactgtgccacctagtccacatggtccctggggtggctttgtgcccaggatccaggaaacagaggttgagggaagggggtaaaggaagggacgtaaagacccccactgcagcaagacagcaggaaccactgcttcttcctgagattggatatgctcttgcactgcggctaactgctgccaggactgaggggtccgcgtgtgtgcgcatgcacgtgggcatgtgtgaagggagcggtggtgagcagagctgggtcacaggataggggagtcaccccatgctctcagcagagccgggtcacaggatgggggagccaccccacgctctctctctctgggctgctctcctcagttccttatccgctgggcctgttcatcaattatgttgctaattctttcatggctagcaggtggttgtgaggctgaacggaggtgctgtactgacagcttgagagtgccccgccctggtcagcacccaacccaatgagcgaggactcccagtgtttaccaaatgctcactacacaccaggccctgtgcgaagtagggttctcactgtgttgtccgttctcacaatatctctgtgagccaggtcctagtgctgccccactttatagattaggaggctacagaggggcgaggtgatctgtggaaaggccatgagtggcagacccaggactaagcataggtctgtctgatgccaaagcccaggcagttagcccttacccgtggctgtcacttgagagtgggcatcagattgacgcaggcaagaccctgaaagactctgattccataggcccaagcaggaggggcagacctctgacttttaaaagctcccaggggtgactctgatatgtggctagggctgcaaacttcacaccagcctaccttacctagtcccatttgaatcttgactccaactgcttattaacctcatggatttggaacagtaatttaagcctcagttttctaacctgcaaatggggataataatatcatccatctcagaaagaatcaagtgtaaggatgactgatttgtggaaagccctttgaacagcacttggcatgcagcaagcctgcagaaaattttagctgctgatgctgttgtttcttgacattctgttcattcagagtcccctttgccaggctctgtgctggtgctgaggaccgagagatgagttggcatggtccatgcccagggcccatgtctaagcatatgagagcaaggtgaactggccactggactgcagacagatgagggtgtctgggaggaaggatggagggggactgagggaacacagaagtatgcagctgggcctgggagagccacaaggaaagcttgaaaggcaatgggctgtaacaggcagagcccagcttcacatcttcagtgctggctgctgcaccgaggattctgagtgagtgacttcctgtctctggggcttgactccctactctgcaaaatgagagaatgatccctgcgttgcctgcctcctggcagaaggaacgggtaagaggatgctttggaaacagaagaggatactggacaggtgaggattacttcctgctgggctaagtgcttttcagctgctggccaggaaaaccaagcttcagccaggaccccagctccaggcttcctcaaatcgtcttctccagtttaggtcagaggctcgagaaagcaagaacgagagaacaagagagcaagagagaaagagagagagggagagagagagagagagggaggagagcttatacagtaacttcattgaacaggaaaattcctatgctatatatgaaaaccggaaaagagaaggaggcgttctaagtttacatgtagaaaaatgctcttctgtaattcagaaaaatagggtctttgattgtggccgagccaggtctactttctaagttgatccaggattttttccctggcaaggaaacagttcttttttaagaaatgcatcgggtgataggtttttctaagaacctctcgcacctttgctgggtgcagataaaccctcaggcaccgtggattgtgttgtgttcattttcctcagaaagggagtcaggtggaaacgggagcccccagagactccagcctgggtggggctgagtttccacacaggcagagagctgtgacattttcctgagcacagtgctccttgcctctggccaggccttgctggctaaagacaaggaagtctgtggggagggctgggtttgtcccggcccctgttggagtcattccttccaggcctgaaggctgtggactgaaagaaccggcagttaggggcggttagaaaaactgaaacactggcgggagacaaggaggaggcagacgatgaggctgtcagacctggcaagggcctttggaaaatatttagtccaaggctctagtttgacagatattgaacctgaggctcagagaagggaagggactgctcaaagtcatatgccaagttggtggcagagtccaccttgcaggctgaggccctttccaccaccccatgcaacatctgagaggtcaggatgtagaagttgaggccgacttgtgtgtggtctcagaggggtagagagctaggcccagccaggtgggtgggagttgcaggggcggttgcctcagttcaacatgagaaaggacttccgaagacttcgaattgtgcagcaatggtcaggtggccgtgagtggagatgagcaggtggaagccaggtggctttggatgggtgagcattgtaggaagctcctccccaggtggtgagctgcactgtcccacacagtctgcggttgctgaactcctgtccctccagggaggtgggagaaagggaagtcacatgccagatgtgatttagacatacccagggtccttgggggccacctctctgtaggggtgtccaaagggaagggaaagaaccgtcccagaagatgcaagaaccccaccctcccaacttgctggcaggacaagctgacaaagggcaaggaggagggacacgtggcttctccgacggtctgccccccatgctgcaggcgcagaggagggggactgagcacctcctcttctccccagggactgagtgccaagaaactcaggtgagaggagcccttctggggtcccaagggcagtccccccaccttaccctacataccctcatcctactggtccagccccaggccacaggcagtatagggtcatctggaccccctcagccccggccccccagtgggaatacacccacccgcttgcaggagtcaccgtggccccgtttaagctgactgaagtgtgccgtcggtctttagaggcgtgtgtgggaatggtagaaacccaggaggggcaccttcagcctttcccagcactcggtgcagagaaacagcagaggagggaaaggaggcgttatgggttctaggcctggcttggccaaactcactgcatggcctcagacctgctctcttgggtcccttaacagacctttcgctttgagtctgttgttgggatcccggttcacagcgcaggtggaaagccttccttgcagttggtggaagcgcagttcccgtagagaccgccaggagccgctgccgcgcacggtcccggggcgtcctcagcctccctcgcgcctccgtccggacatatccgcagcgctccttcacctggagcgaggaacgctccttagcctcctctggctttaaatgctaactagcgctagcgctgggctcaggtcccagatgatcgtctgtgagagggagctttgcaaagccagctacagttctctagggaggcaaggctccaaagctcaggctagtcccgggcactgcttcaggaccccacagatggaaggactgatccagcccatcgcacggaaggggaaaccgaggcccagcggggtaggggaggtgccagatgatgtccctgagcctgtggcagagaggaggaggagaggtgagagttcgctcctgttcttcatctctggccaaatcgctgtcatctgtgtggaaggaaaacctgaaccctgctctgtttgtttcttcatggctgggattctgcctggtttccatggaaactggctttggacccttgggaggaaagtcgcaccctgccctgactgctcagattttcctctgcctcctctgtctctgaaaccgtctgatttctcctctctgcgccctgaggaggggccaccccaaaactgcacttaggagtctgaactagatttgagggagggaggctcaggttgtctctccctgtgtccgttccttcacagcatccccttggctctgtggatgtttagaggaggggggatgactttggccctttttgcagagtgagagtggggcccccgtgtgttggggtgcagctgagcctgactggaaagatttagatgtaagaagatggggaagagtgatgtcactagaaggaatagcatgagtgaaggcaaagacacggggggagaatgaggagatgaagcagagggtgtctcgagtagaattttgcttttatgctgaaggcactggggagccattgaaggctttggagcttgtaataggagcagatgactactaatggtcacctagatagtgagctgcttgagcacacatgttccaggcttagctccatgtctccagcactacacaaggcacaatgtgggagctttagaaatatgatcaaattcatgaattggaaaagtaagttgaaaacccccattggaaatgaagctatctctaagcattaatgaagtgagagaataagaccggtcagatgcagccccaggaagtgtttgaaggcagtgaaaatacatagaataaatcacagtggatgtggctctgagagtctatctggtctaactctctgatgggaaaactgagatcagggagggggactagctggcccaaggtcacagacagagtcttgaacctgagtccttcctcccctccctgggtctctcattgccccatggattcatgcctcccagatgggctctctgggccagtggatccagcatcgtggagatgggagggaacgtggactttcaggtgatggatgggcatgcagtgaggtcactgttggatgtcagactggagcccgacctcagtgactctcaccagggcctcagactgtgagcctggcaccttcaattcaggaatgcctaggatttagttcagccagcaaacacttcctgaggacctgctcagggacagagcctgggtgtgggggagacagggagaagtggacgccagttcctacacttaaggaggttccaagatggtagggtccaacaccttagtcatataatgccatatatgctacatagagtcagggccaagtgcaggagcgggaatgcccagactacctggtgggggaatccaagaagacttcatggaggaggtgatgacattgaagttgggccctgagatgtgtggagcagttcctcaagtggagggaacagcatacacaaaggctcaagggtgtaaaatgtaggacccattcaggataccttgagttttccagtatgacaattgcatgggaaatagcagggtaataataatagggaaagaaatggcagctaccatttattaagcactctgtgtgctaagcagtgtgctaaacattttaggtatattattttatttaagtcacacaactgtcctctgagagaagtattattatctggggataagtgtgggccgcttccaagaatcctcaggctgcagagttccatcagcatgctccacgccagtccccagtcccctccaaaatggtgggatgtcttcccaccagctgtgatctccaccctcctcccttcttgcccagcacagagccatccaaggtcaagcccatggacccagttgctgggcctgtttgtcttggctccctggcttctcctcccctccctggtggctgcctaaacaggtggccctcctgctggaggccaaagggaaatgagccagcaggcccaggcgcagccgcgagtgagcatgggtcactccaggtcaggggtcgtcccctaccacgccatgccatgggacagtggatgtggaaggatgtggtgggggttgctgagagcagagctgggctgctggggctgacttgggcttgctctacattcatggctggcctccctcttggcggactctgtggaaacaaggcctgcgggccagcgcctatccatgtgtcctgtcttgaatggctgaggtctagggggatggagggtgggagggttaggaagggatcttttttgcagactttggtttttgttaagcttataccttgcatttcccatctgtcgtctcattgaatccccacatgggaagtgggcagggacctcccctgatcaccaggaagtcatcgcccaaaggctttgtgtttggtaaagggcaaaggaggggtctcatcccagctgtgtccaaggaagaggatgttctccactgcaggctgcctcctttgccccctctccagctgaccaaccattggccaggacctggagtggtcggggctgtgggagggcaccagctctgggactcgtggtaccaagactctgtccacccttgcttggctgccccatctgttgcttcctggctgtgcctcctggccatggaagtctccctgaacatcaatttccctgtctagaaaacaaggatgttggatagattcatgaatttttgtttttaagcagactcctaggcataagaattcccagaattgccacatgcaagcctggatctactggccatgggaagcactaggctggtttaagcaatgagctttctgagtgggagcctctcaggcccttctccctgtgtcgcctgaacgcttaacctggccctggatccctcagagacaccacttggaaacaagccacaggatgtgaagctctggtgcttttactctctgtggcaccaggaattttccgagcagaaagaggcttccccctcctgttcccagcaggaaagagagaggaaatagaggaaaagctttttactggattggataagcgaagaagaaagcagagctctcagtagggtgtttgtggttttgttttgtttttgtctttaaaccgtggaggaaagaaaagaaatctcagtgggatgtgtggttttctttgtttcttttccttctttttttctttctttctgtacaaagataagctgtatctgagtgaggaaaagcaagaagaataggttttatgatttctataagtggatgcaaggagataatctctttaaaaatatgtagatgtctttacttttcataccatgtatatgctgtaaaatagaaaaaagtataaaaagatatccagtgaaaagcaagtctcccagcccccagccaccagcttccttccctggagacaaccactgccccgtttcttgtgtattcttctagagctattgtaatataccatatatatttaaatatatatggtatatttaatttgtattagtacatacatttccaactgatagcaattcacttctgcaccttattttgtctgtttttatatagtacatcttgattgtttcatattagtacttaaggaatcacatcttttgaaacgctgccttggatttcgttgtgtgaacctgtcatcatttattatattaatcattcccaaagatgggaattttaggtaaatttaaaccacgatgctgtgaatatttgtgtatgtactttatatttcacatatgtaactttatctgttaaaaaattcatagacgtatgactgctgggtcaacaagtacatgcacatttgccattttgataaatgttattaaattgcctcccaccacgttataacaatttatgctcctgccagtaacgcaggagaaggcctgctgccttaaacccttgccaacacagcgtattctggtctttgccaatctgatagggaaaatggtatcccttcgtaatcttaactcattctatcattatgaatgaggttgagtatttttcatatgtttaagattttaatttcttttactgtgtctagaattttctattctttgcccatttttcttttgggtattcatttactttgcatattagagaaatgagtttgttgctgtgatttttgtagcaaatatcagtcatttcatggttttggggttttctttgacattgcagggattatctttattattattattattatttattagttctatgcagaacatttttttctaagtggtcaaatttaaccaaatttaccaatcttttaactaaaattaatttctgttttaaagcaagttgtaaactggagaggataagcattcaattgagaatcaaatctgagttcatggccagcaaacacttcctctctattaaccttagtttagtgttttctaaaatgaggtgattggaggctgagcgcaggggctcacacctgtaatcccagcattttgggaggccgaggcaggagaatcactgattccaggagctcgagaccaacgtaggcaatatagcgagaccctgtctctacaaaaaaatgaaaaaattagctgagtgtgatgctgcatgcctgtagccccagacatttgggaggctgagaggtggaagggtcatttaagcctgggaggtggaggctgcagtgagctgtgatcatgccactgcattcccacctgggcaacagagcaagactcttgtctcaaaaaaaaaaaaagaggggacttgagaatatgtacacattcattcatttgttcattcattcactataagccctgggttggttactgggaagacagatggcccagtgggaagagaggcaagtgacccaatagtgacatgcaggggctatgatggaggaccccgtgtgtacagagaggacttctaatgcagcccccagaggggagggtgtgggtgcgggaggtgaagcgagatttcaggggaagcgaggcctgggctgatgagcaggagtcattcagtgaaaataactgggctgggctggggcagatggcacagaggaaagcattcctggcaggggtgggagtccctgggacagcatggggcacgctggggctgtgtcaggcatgtcagggagtagggagtgcagctgggtcctgaccacagagggcctcttgagccaggtggcagcagcctggtcagccctggccctgagggccatgaaaaatcctatttcatagaaggcttctaagcaggatagcaacaggatcagatgtgctcttttgtcgaggaggggttaatcgttttcataaaaattgtatgaaatattttccatgaaatttgctataaagaaaaatacaatgaatatttcttttgaataccacctgaacaattaacactatcactaccgttgaaaagccccgtggacctctcccaaattgcatctctctgcctcccctaaatgttggcaagaatatgctgctggtgggtctgcgacatgcatgacacggttgcttcagagaacaattttgcaatattcagggaagctgtaggtgcacatacccatattatccaataattccacttccagctgtggaattacctgcacaggtaagcaggaggagatgtgtataagggagtccgtggcagtatcatttgtaatattgatggaaacctcaccttccaccaacagaaatgtgaatcaacccattgtagcttatttataccatagagtactgttgtgaaaatataaggccaggccaggcgcggtggctcattcacgcctgtaatcccagcactttgggaggtcaaggtgggcggatcacctgaggtcaggagttcgagactagcctggccaacatggcgaaaccccgtctctactaaaagtacaaaaattagccaggcatggtggtgggcacctgaatcccagctactcaggaggctgaggcaagagaatcgcttgaacccaggagtcagagggtgcagtgagccgagattgtgccactgcactccagcctggtcaacaagagcgagactctgtctcaaaaaaaaagaaaagaaaatataagatcagagccacatgtatcaacagggataaatctaaaaaatacaatgctgagtgaaaaataaaagcaagtttcagaagaatgtgtgcatcatgccaccatttatatgaggtgtagaacacacaccatggttctacattctgttagaaacacgtatcgagtggacatacaaatgcgtgggagtgataaacaccaaattcacaagaatggctcctgccagagcatgggcagaggaaaaggactgaagagagttcatgggagcttcagctgaattgatactgtctttcttacgtggagtggtgggcacatacttgttcctcataatattataattattttttttagagacaggtctcactctgccacccaggctggagtgcagtggggtgatcatagctcactgtagcctcaaactcctaggcgcaagtgatcctcctggcccaacttccagagtagtagattacaggcacgcactaccacattctgctaatttttaaattttttgtagagatggtctctctgtgttgcccaggctggtctcaaactcctggcctcaagcaattttcctaccttggcctcctaaaacactggaattacaggcatgagccaccataccaggccctattttaaaattttaaaaaatgatatatatagagagagatagggtatttctttgttgcccaggctgaagtgcagtggcatgatcgtatttcattgcagcctcaaactcttgggttcaagtgattctatcacctcagcctcccgaatagctgggactacaggcacacatgaccacacccattaatgtataatgtattttatttatccattgtttttcaaaatgatttcaacatataatcaatataaatagtattgagatatttttccaagcaaagtctttgaaatttagtttgtagtttacatttatgacacatctcagttgggaagacccatttttcaagtgctcaatagccatatgtggctactggttatcaaatcagacagggcagggtctggtacgatagaaacttagaggtcaccagttacaacctgatacaactttatcaacagatagagttgtgtcaggtgacctctgcggttcttttctaaaccagcaagtctagatgacagtgatgacgatgatgatgatgatgatggctgccttttttctttttttttttagacagggtctcgctctgtcacccaggctggagtgcagtggcatgatcatggctcactgcagccttgatcacctgggctcaagcaatcctgccacctcaacctcctgggtagcggggactacaggtgcacaccacctggcttttttgttgttttgtggagatgaggtctcactatgttgcccaggctggccttgaactcctgggctcaagtgatctgcactccttggcctcccaaagtgttgggattacagttgtgagccacagtgtgtccagccatgatatccaccactttttaggcatttggcatgtgccagcactttgtattatgtcctttaatcctcacaacaacgctataggctaattactcgctttttttaaaattgtggttaagcatacatagcataaaatttggtattttaaccatttaacaaccaagtgtctcatattgttctttatactgtatttttttgtgtaacctagatattccataataattgaggttagtactggcggtgagcagccttctctgtgagtgttgcggagttgagatgggggcatggcagtcagggcatctccctctcccagccactaagtatacatacccattcatgggaagtttgagttcctggaccacctggagtcttgactccatccttcttgctgctgaagggtcattgatatagtaggcagactaggtggagccccacccgcaaccccggtacagactcccccatctcagtgaggctgcagcagtgaatcagccagaaatcacaccagccatggctcgaaaatgtcctgccacttaccagctgcataacctcgggccagtcatctcatcttcccaagggataagagcagttaattgccagggctgctgtgaggactgagtaaaactatgcatgaaaaccacattgttattattctttataagggagctcaagggcacagaggcaggctcccatgtcagcctcactttcctggtcagtgctgcaggcgtgattatccctgcgcattgacctcttgagattgttcagtggatataataaaaataaagaatagcgaatgtttgttgcactgctaccattattaaccaggggtttccgtggacggtctcatttagtcattcttttggagcccattctagtgcctgtatgatagaggaagacactcagacttggagtggttcagtgactcactggagttcacacagctacgtagttgtgtccaataagatggtggcaagttgggtaaactggaaatcaggctgattcctcaggtagggctttccttagagggtctctcgagtgtttggggttttctctggagacaaacccgccaagtcctcagaaaccacttaggttctcagtggcctctggcctttggcgatagcccagacagccatcaatcagtctgccttgccctctggcctccagaggaggacactgctcgattctgatcctcactcattccaggcctcctcatctggttgaatcctcaggatccggcttcacttccaaggccaaagggtgttacttgtccattgtcctggctacagtggtcttgtccccctctccctgggacttgccttcctgtctcactactggtaccttggatgtcaactcagaagtgggtgcatgttgctgcaagctagtctgcagctttctcctggggaaaatacttggatgggccaacattctggagcctgggggccttttcaggacaccataatggagctccaccatttctccctgcaaggtgtggtggcatagcctctggggtcagatgctctgggtttgaaacctgcatgcaacttaccttgagcaaatttgttaatttctctaagcctcagttttctcagaagtaagatggggataagagtacctaacctcataggtttgttgtgaggattacatgagctaatgtatgcagagcgcttagagcagggcctggtgcagacagagcttagggaatgtggatgatgatggcggtgatgtcaaaggcgatgacaatgacgcaaatttcaattgccttgaggcctgggaacacttcactgtgtccctgattttccctgcacactcagaggcacttaaacaatagacctcattcaaaacaaaacaaacctatccagtttttttgtttttgtttttttgagatggactctccctctgtcactgaggctggagtgctgtggtgcgatctcagctcactgcaaccaccacctccggggttcaagtgattctgctgcctcagtctcccaagtagctgagattgcaggcatgtgccagcatgcctggataatttttgtatttttagtagagacgaggtttcaccatgttggccatgttatcctcgaactcctgacctcaagtgatccacccacctgggcctcccaaaatgctgggattttaggcgtgagccaccatacctggcccctattcagttttatagtggggaaaaaaaaaatctccaagtcgatgggtgaacattatatattctagggattactcataagtgttttccaaacgcaggtcatgaactattagtgggttataaaatcaatttagtaattaattaccagcatgtttttaataaaatgaagcagaaaaagaataattaaatgaaaagaaaaatatttgagtgcctggtgagtattaaatcatgttctatgaaacttctgtttcagtgttacagatatctgtctacacgtgtgtatattgggttgcagtgcaaatgcatttctttttgtgggtcgttgtcaaaacgtttgaaaaacaaccatttaggaactacagtttcagtggggttcctgagtgatcccgtttcatttgtgactgcgtttcttcctcattttcaagcaaagtggaatatacctgtaaagcgtggcctctctctccctccctgcagagactgcttcccagggtcacctggacctcacgcagctcatcggtgtcccgctgccctcgtccgtatcctttgtcacaggctatggtggcttcccggcctacagtttcgggcctggtgccaatgttggccgcccagccaggactctcatcccatccaccttcttcagggacttcgccatcagcgtcgtggtgaagcccagcagcacccgtggtggcgtgctcttcgccatcactgacgccttccagaaggtcatctacctgggcctgcggctctcaggtgtggaggacggccaccagcggatcatcctctactacacggagccaggctcccatgtgtcccaagaggctgctgccttctcggtgcctgtgatgacccacaggtggaaccgcttcgccatgattgtccagggtgaggaagtgaccctcctcgtgaactgtgaggagcacagccgcatccccttccagcggtcctcccaggctttggcttttgagtccagcgctggaatcttcatgggcaatgcaggagctacagggctcgagagattcactgtgagttaaagtcccactccaggtagatcagggaggtggatgaacagactcgccatgcaataaatggagcaactattattgttattattttattcttatgtcctcaaagaagcatgcgtgttatgatgggaaataacactaggcctggaaccccaaaacctagatttccatcctcagttttcaacttaccttgtaaatttgagacagttatccagattctctgatcctctctgtgtttccttatctgtaagtggagataagaaaacctaccccacagtcttgtaggtcaaataagataatctgtgtgaaagcactttgtacgttttaagattttatataaaagagcaaggtttgttatagccctaaatggtttgatctttggatatgggtgacaattgcacgtaagtaatttctgaaaaggtgggatacactagaataccagagtgagaggtagcttttcccgccttctaggcaatgtgcacttaaaaaaaatttaaactgactttactatcaaaatgggcttttatgaataaggcattctaaagatcactaagttattgtagttactcatttagtcagcacacgtatttactgatgtctcgttggtgaacaggacagcaccacggggtggagtttgggtttatctggagtagagtgaaagacattggagaatgttaagaagttaaaacacaaagggcaatttttaaatgctcactttaggagcctcatggagaggaagctgtcaggtgtggggagaggggaggagagtggaggcagggaggctgtggtagcccttcttgggacgaggccttcaaactcagaagcattgagctgcaggggaaagagctttctgggagagggagatgtgcgtttcagggcctgccgctgacaagctggggacctggagacaggaggctgctgtggtgtgcacacttgaacacaatgctccccaagggcctctctggcccaggggtcagtatgatactggcccaaggagagtccccccataactgagagtgggccaagaggtggcctggcttcgtggttgagactgcaggctgtacatcctcattcccacgcttttacctgttcgtctccattgccaaaacaatcatgtcttccactggcagtcatgctgtgtacgtgcaaaccgtggcttctgatccgtctcttttccccagggctccctccagcagctcaccgtgcaccccgaccccaggactcccgaggagctgtgtgaccctgaagagtcctcggtgagctcccctactatcccacagtgggccctgcaaccccagcagccgcagcctggggagggctggatgcccagacagtggcgtggagtttctgaaacctctcattttggcaactgctgcctcaagtcctattttgggcttttggcgtgatttcactttttaaagagcatcagccatctctggtgtggggagctgtgtttcttataaggtgtcaggatcttccatggctgtggccgtcaatggcctgctttcccgccttcttgccaagaaatggtgtcaagattctaaaatcaaagttaaaactgagatattctgggagtaaattcctataaaaaacgatcctcaacttagcttttatgcttggcaaatgagttcgttcctaagctggggatggagtggtgggcaggaaaaaaaagatgactccttcttccctccctctaaggattgactgagcacctgctgggtgccagccctgggtaggtgctggagataaaggaataactgggaactgtttaataagctgctcatatgcacttccatacccaaatacagtggcagagctgagtgtgatgggaaaagggggagatcctcaaacccaaactcaacgttgtcaggtgggagcaggagaggaaagaggaggaacttgaagccagttagggagcaggtgatgcctgaccaatgacaagggtgaggcctcccagggagaaggggtccaggatgcagtcagaggtgagcagaaggtagcgcattcctgcaattcctgttgccttttgggtggcatcaacgtcacaacagaacataaattgattttgttaactttgtaaaaaacaaaatgctgtcgatttcgttggaaagcccctgagaggtggaatttgggcctgtgagaatgcctgtgttccatgagccagtggtcccagcctgacagtcatgtgatgctgatcagtgtagtcacgcgttagtctctgcattgccattaatactgaaaaagtagaaacaacccaagggtccaagaacaagggattggttacaaaatcacagcactcgggctccttgtctgcctttaggaggctaattagaaagattaggtaatgccaggaagtcatgcttcggctgtaattgttcccagcgcaagattccaatgacagcctcacaaaggttgggagagtggtggggacctggatcgaatgaaagtagatatgttagagagagtgagaaatcattgtgtattctgttagagcaataaaatgtggaaagaaataaaatgaacaaccaggctgggcgcagtagctcacgcctgtaatcccagcactttgggaggccgaggtgggtggatcacttgcggtcaggagttggagaccagcctggccaacatggtgaaaccccatctctacaaaaaatacaaaaattagcccggcgtggtggcgtgtgcttgtaatcccagctactcgtgaggctgcggcaggagaatcgtttgaacccaggaggcagagtttgcagtgagctgagatcgcaccactgcactccagcatgggtgacagagtaagagagaacctgtctcaaaaaaataaaaaaataaaaataaataaataaaacaaataaccaaccatgcacactgcacacacgctgtctccttaaccccactccgtctctcatagacacacacacacacacacacacacacacacacacacacacacggtttccctgtaggagagtcggtttgtcagtttctgtaactttcccagtcatccaactcttatgggccctgcccgctctgcccggtgtgtggcacagtttgtctccacacaggcatctggagagaccagtgggctgcaggaggcagacggagtagctgagatcttagaagccgtcacctacactcaagcctcggtgagtactgggatgctgtgccatgtgatcttgctcagcttttagcaggctgagaattactagagggggcccagagtcctgggtctgacctctttgtttccagacctgtgagcttaatcgttgactcatctgggggggtcaggaaaataatggccaatgggcactttgcaaaatcccctggtgaaccgcaacaccagcttcctcagtgccaccctgtgtgtggccatcagagggctgtcaagggcaaacgctgtgctgtattgctttggagccttgggtaaaaagcctgtggccttaggtaacttactcaaccattctgaacctcaactcctcttccaagaatggtgattctaatagccctatctcatagggttgtttccagggttagatgatgaagtgcagggacaagcctcagcccagcatctggcatgagggaaatggccctgaacgatggctcttgttatatttgctcagtgctccagctgtgaaagcacagtcaggaccccagtcttgtgagtcacagagtcctccagggagctcacttctgacgcatgggaaaggcaatcctaacttccagtggcctggacctcctccctcctgggaatgctccctgtggctgagacatggaagtggttttgaaagcactgagtcagactgtggggacacccaggagcctgtttttaatgaaaacagcaagcagcagcagagtcactaaatacagcagagcttcagccgtctccttgcctggtcaggctactttgtaaacgtatctctaatagaagaaatcagggagatggaaattaggcagtggctggagattacagaccttgggcagcagggctgtgcatgcagcagagctgtggatgcagcagaatagaactagactctgttagcactggaaggacccaaagtcctgtacatctctttctgtacagaggtgtacggaaaactgccctttgtgtacaaactgagcaaaccaaggcccagataggggaagacactgactgaagggtgtatgggccggactggggtaacagcatgagtctcctgatgcccatccatggggtcatggcctgagtggtattgcaaaagtccatcccaaggatggcggccaactcttggccagttgggatgaatgaagtcaagggtccaagttgcctgcctacctggtgattggggagggcaactgctttgggtggtgtggctatcctgtgtgcccatcagcccttggccatcccacaggcatgtcccaacctggggcagtaggacacagagtggccttcacatctgatgctgccctgtgcaccagttcacaattcacagcgaagccaactcaggcaaaggtgccaacagcccaaggttgcccttagagagggacaggaaaggagagtggagtttgagcctgagatgatcacaggggacagaagtagggcagagaagcttgggagggggcaccagagctgggcagctttggacagagatagagaagtgggaggggaaggaagagaactggcatttcttgataccactgtgtacctggtgctattgtgtctggaattggtgggttcttggtctcaccgacttcaagaatgaaaccacggaccctcgcggtgagtgttacagttcttaaaggtagtgtgtctggagtttgttccttctgatatttggatgtgttcagagtttcttccttctggtgggttcctggtctcgctgtcttcaagagtaaagctgcagaccttcgcggtgagtgttacaactcttagggcagtgcctctggagttgtttgttcctcccggtgggttcatggtcttgctggcctcaggagtgaagctgcagacccaccccatgagtgttacagctcataaagtcagtgcggacccaaagacactaacagcgatatttattgcaaagagcaaaagaacaaagcttccacaatgggaaaaggacctcaccaagttgccgctgctcactcaggcagcctgcttttgttcccttatctgacccccccccacatcctgctgattggcccattttacagagagctaattggtccactttacagagagctgattggtccgttttacagagagctgattggtccattttgacagggtgctcattggtgcgtttacaatccctgagctagacacagagtgctgattggtgcatttacaatcctctagctagacacaaaagttctccaagtccccactagattagctagacacagagcactgattggtgcatttacaaaccttgagctagatacagagtgctgattggtgcatttataatcctctagctagacataaaagttctccaagtccccactagattagctagacacagagcactaattggtgcgtttacaaaccttgagctagatacagagtgccgattgatgcatttacaatcctctagctagacataaaagttctccaagtccccactagattagctagacacagagaactaattggtgcgtttacaaaccttgagctagacacagagtgttgattggtgtgtttacaaaccttgagctagacacagagtgttgattggtgtgtttacaaaccttgagctagacacaagagtgctgattggtgtatttacaatcctttagctagacataaaagttctccaagtccccactagattagctagacacagagcactgattggtgcatttacaaaccttgagctagacacagggtgctgattggtgtgtttacaatcctttagctagacataaaagttctccaagtccccacccaactcaggagtccagctggcttcgcctagtggatcccgcacgagggcagcaggtggagcggcctgccagtcccacgctgcctcctcagcccttggatggtcgatgggaacagccgccgcagagcagggggcggtccccgtcagggaggcttgggccatgtgggagcccactgccagggggctcgggcatggcaggctgcaggtcccaagccctgccctgcgggaaggcggctgaggcccagtgagaattcgagagcagtgcgggccggtcggcagtgctgggggacccggcacaccctctgcagctgctggcctgggtgctaagcccctcactgcccagggtcggtggcaccggctggccgcttagagtgcggggcccgccgagcccacgcctacttggaactctcactggcccgcaagcgctgcacgcagccctggttcctgcccacacgtctctctccacacctccccacaagcagagggagccggcttcagcctctgccaacccagagaggggctcccacagtgcagtggtgggctgaagggctcctcaggtgtggccagagtggacgccaaggccgaggaggcactgagggcgagcgagggccgccagcacgttgtcaattctcgctattgtatgcatgatttcacttttgtttcttgccaccctgcaaggtaggtggcatcagccccattgtgcagattcaaaaatgaatgcccaggaggtggggtgcctcttccagggtcacagggtagtgaagtcaggactcaagccaggcctcactccccaggcttggaccctccccaggaccatggcactgcaggcactggggcagatgtggggcacgtgtcagccaaggggggctatgaaatcaatccccagactatctggaaaagtgaaaaagaaaaagttgttggtgatttgatggacttggtggcctctggggaacctctaacactttctttccatgcttccccaacccaacttttctcagtggttttatgggaactggtgcatatcagagttccaccaagcgtgaatcccagctctgccacttactagctcttgaccttgagcaagtgacttaagctctccaaggctcagtttcctccttggttacaatagagtggacctgcctcatagggtcagtgtgaaaattagacaaattgccctgtgcaaaatgcttggacagtgcctgttgttgctactgttgaccagtgggtttgttgtgaggattaagggaggtgatgtgatgtgtcagagagcagctcagtgctggactcagcaccgggcatagtacagatgcctcgttcctcttggggcctcctggttggccagtggcttgggctgacaggcatgccaaacccctgtggctgccttcagttattaaggggattgccctgggctgtgcctcgaggcctgatggtcctgaccttaacctgtctgttcctgatcatcagaatgccttccctgtgcacccgtctgtctgcaccacagttcacgctcttccacatgcttccatttcctttagtctcatttgcagggaggtgtttggggtctcttctacataggagggcactgaggccatggagatggttgctggaggcacccagcctggaggtggcagagccaggtctccagctcagggtccagagtgcactcagtcatgccacccctgagctggggacttcccccttttaacatctcctggaagggctttatggcattttccggcagccaccctctaggacggggaatttccctcttcagctcagacagtccccgcccgccccttgtctgtctaacttctttcttggaatgaatctcacttccccatcctcagcctttccagcctgccaccctttgagacatgagccgtcgccagtgaactgaattgcagactttctgagtggtcagggactacaaagtctgcccctccttgccttcttccccatttaggattggggtccttgctatccaattctttgcattttcagaaagttctatgctgttggaattaacatccctgtggttctcagccctggctgtgcatcagggtcatttgtgtgtaagtgtgtgttgggggtgggggtggcatggggggttggggaggcactgtgttggggggattggtctttaaaagcagattcttgcctgggctgtagacctggatgttcagcttcagtagatctggagtgaaagatcctagaatctgtattgacaaaaagctctgcaggtgattctggtcctcagccagggcctctttcccaaccacacccagatgctcacagttctctggacagaccgagcactttctcccctccatggcgccttagttcctgcggttctgtttgcctggagggcccctcccagctcccatttctgcctggcaagttcctacttagccttcaggatccagtccacatcctctccttggaggccattatttagctaagccccctcctcgcacttggctctcactcacgccatcccatgcatcactccgaatcatggtttgttgcgtctggtctaggtctggggatcctccatcacctgacagcttgaggacagacacgctgtcttagttattcatttctgtgtccccagggctcagccaaggacctagcacacggtagggcctctggaaatatgtgcagaatgagtaaatctgattgtgtggacgtgagcctggactcagcaaattgcaacacttttaatagcaagtcttcagacttgaggttcctattttgtcacaggccacactggatccccattcacattgacctctgaaaaccaaagccacctatttgaggcaggtccccttaccctcactcctgagggtcaattcaccagaaccatgccctgtccttgcaggggggttgggatgccttgttgggagtttgacaacttcagccaccctgagttacagagctcagcccccatctcgttgtcttcctatgtttcctgaaccctcacctgccctgcccgcctcatcccaaagtccaaatgccttatagagcacctttgctaccagccaccagcagcctcactccagactagagatgagcattcaggggcttgagcattggttcctgaacaagtgatggagtggcttctgccttgatccctcacagggagaggagaggaacctcctgggcaggggtctttatcttccctgctagatgaacatccatctgggtgaaatggagacatcccacctggtcttgttcacaacctcccctggggaggtgcctgctgtctgctcccactgctgccctggttcctgtcttgtggacttctttactgccaccccccagtcacctggcgtaagcctcagctcccctagtccatgatcacactgccaccagcgaggactctctaaaacacacagctgcccccaccactccctctcccgatgctccccagtggctgcctgtggcccttgggttcaagcccattcttctccccacagaaccagctcctccctctgcctgcctccctgggctctgttccactgcttccctcctcaagccctgggctcttgccaagctcaagttgccaggccctgactttcatcaaccctccacccctgtgttctgaaaccctgctcattctccaaggcccaactccttaaagcctttcctcccacctccaccctgaagattttacagtacaatagaatccatggtgattgtctctgggtgttaggactcaaggtgatttctctttttgctcatctgtacttacagtgttttcaataacaaatatggaatatttatgtactaaatataaaggtgtgcttagcccttccatgcattttctatttcctgccttcaagtagttctttattgtcctcatttttacagaggaggaagctgaggttcagtgaagctccatgacttgcccaacataactaagcttataagtggagagctgggatttgatccaggtctgactgtaagaaatgaactattaaattctaaatgatggggcttccaagaatcctccttgttccatggaccagaaattttttgatttactagattctgaattaaggaaataaccttctgttattagtcaggaaaggtaagtgatgctgcagtaacaaattaacctcaaaaatcttagtgccttacaaaacaaagattggtttcttgttcataccacgagttcaacactgattcacaggattcttccatgcacccccagcccctttagcttagaaagtgatgaggctatctgaatgctgacaagcgctgggtcccgcgagctgctgcttgggtccaggggtgatgctgtgacttttggagcccatgctaggatttctgcgtagatcactgaagcactctgtgtttctgttggggttttgtttgtttgcttttctctagttggtaatgttggttaagacactgactggctttggaaaagctatatagatgctgaagtttcctcggaaggaaccacacccgtctttcattttcataggtgttttcatatctggcattgaatttatatgcagtttattgagtgcagcctggttcattcatttgttcactaattcattcaatcattccctcctctaacagatctttactgggcacctcctctggctgacctgggatttgggaatcacagaaatgtggtccctgtgctcagagagctttggctgagatgaatagtctcactgtcaagtgaacagaatctaatgacctctagtaggcacctctttcaggccctgggaggtgcagccattgcccaggtagacaccaagtggggccaagctttccccttggtttattcagcatcttgtggatatattattttcttcagtgatattctctgtcatttcttctgctttactgccaagtaaatcattttgcatctcatttttcctcccttcagcccaaagaagcaaaagttgaacccataaacacacctccaactccatcctccccctttgaagacatggaactttctggtgaacctgtacccgaggggaccctggaaaccaccaacatgagcatcatccagcacagcagccccaaacaaggcaagtccggatgcacatgcctacgtagtggccttttattgggtgattactatgtgtccagccggggccatgtatgtaacatacagaatctcatttaaccttcccctcaaccctttaagaaagggtgagaaccaccctcattttacagacaagaggaggaaattgagccacagagaagttaagtaacccagccaggagcaaacagcttgtgaatggcagagctggcatttgagctcagatagcagatcttctaacccccagatctggagcttctaactcccagattctattccttctggggtttaacagaaaagtttgtaataatccttgctctttgttgaatacctacagtgtgccaagtgtttggatattttgtctccaacaccgacagcataccgcctactcagtagcactagccactattttataggtggaaaaaccaacacttggaagagctaagtccagagtccccacccattctgacttttgccacaaactccccaactctcagaggatcagctaaactcctgtgtggcacaagtgagaaactgatggccagagaggggccagttacccagcaaggcagcagcagtccctaggagaagagctggtcccctggctgcccatccagggctctggcccctgcctcttgtccccctacctgtgcagaggagcactggtaaaagcccaggcgtcaaacactatcccccaggcactagcttggcatatgcccaagccctgagatcgcttgtggtttctgtcatttctcagaggggccgtcacttcagactgaagatgtaagtacaagatcattcctggcagcactgttcttaggaacaaaaataacccaaactgcccacagtagggattggtcggccaaattctatttcattcatacatacagccctgacactggtgatacagaagatttaatgacccagggacatgctcgtggtatattccaccaaaaaagcaaattccaaaattatgtctatgaccctaattttgaatatatgttatttatatctatttacatatagctatgtagagcgatgtgtgtgtattagatacatcacatattagacgtaatattcatcaaaatgttataagcagttatctctgagtggtaggattatggatggtttttactttttttattgtacttccgtattttattaatacaagtcttctacaataatacatatcactattctttttgcttctgccatcagttaatgagtgttattttaacaactaaatttggggagtctgtgggtcagagaaagtatagagaactggagagaaaaaattgtaggataatttaataacgtcatgacagagccaaggaggcagggtgttgctgtggaaatactgcccgctggggagagtcagacagcttggaaggaggccctgcctagccccctatttgctgtcggcctggggcaagttgctgatcagtttccaagcttcagattccttagccgtcctctgggagcatgaacaatccccgatgctgggtggatgagagggctgaatctggccgcagttgtggaagtggcttctgaattgcgaatgcttttctcaggggtggaattaggatctctcagcaaggggttaaggtgaaggggctggggcgagggctttcctagactgagaagatgaggtccacgtggggactgggctctgatcccaacgcagctcgcctgttcccgggatcagccacactccttatctagcagacaaaaggtcagttgaaagcaatggagctagccaaagtgtccttttcttcttgatgtgtagacagcccggatggtgggagaaagccctggctaagcaaagcccctaatatttgcattcagagcttccctgacaccatcgtgacccgtggaaggggccaccccacctccttcttcccaggggtcagtccttggaggacaggcaatcggctgcttgcacggcaccccctggtggtcagagcagggaagacgagagtgctcgacccgtgctggccactcttccatcacaggatgggacaggagtgggtggggaggggggcagagtcctttggaggatttggcacctcttccagagttattgtgaccatgggacctgcgtgagcacagcgtgtgtgggaagggcctggcccggggacaggctgacctggcttcagggcccttcccagtctcagtctcattcccagggttaataatactgaggtattgatgtgtggatccggcaggtcacacctgtcatggggtgatagtgggatccccaaccaggatctgcccacctgcaggaaggtggtgggaggggtcccggtgggcaggacaggtgggccagcaggagggttgctggagggagtgcatgggacaatcttggcatgggcccagccataacaggcgtgcagtcatggtagtacaacttctttttcttcttcttcttcttctttttttttttttttagacagggtcttgctctgtcacccaggctggagcacagtggcacaatcatggctcactgcagccttgacctcccaggcatgagctccctccttaggctcctgagcagctgggtctacagccacatgccacaatgcctggctatttttttttatttttagtagagatggggtctcgctatgttgccaagactggtcatgaactcctgagctcaaatgatcctcctgccttggcctcccaaaatactgggattacaggcatgagccaccatgcccggccaatgaataagttttctttgcttcaaaaatccatttgcgtttttttttttttttgagatggaatctcactctgtcacccaggctggagtgcagtggcacaatctcagcttactacaacctctgcccactgcaacctctgcctcctgggttcaagtgattctcctgccttggcctcccaagtagctggggttacaggcatgtggaatcacacctggctaatttttgtatttttagtagagatggggtttcaccatgttggccaggctggtcttgaactcctgacctcaagtgatctgcccacctcggcctcccaaagtgctgggattccgggctgctttttaaattgcaaaagaaatatatgcatgtgggaacaattaaattaatgctcagttgtataaaccagaaaaataatagtttcctcttcttacactcctatcttctggaaaatatcagtactaaacactgtggtttagccaagtatataaatatataagcacatacatatacatatacatatacatatatgtatatattatgtatgtcataatcattattacataacatgaatatgttatatatataataatgatacgatatctatactcatactttttttttctattttacacacgtaaaaccatatcaacaatgaacatttatcaattgcttactatatgccaggggctgtcctcaatgctttatttgcattaacttacttagtccttgtgacacacagtactcaaaacaaccctatgaggtaggaattattgtaattccccatttctagataaggaacttgaggcagaagttgagcgacttgcctgcaggtggtgccagagcctggaatggaaaccacacatgctttgccatgtatgttgttctgcaacttgttttttccccctcttgaccctgtgtcatggtatctgaacatctttccaagttagctggtgaagagatacctcattcttttccaagactgcaaaatgtagttattgatagcagaatgcctgcttcctgtagggtctggtgagatcctgaatgacacactggagggggttcattctgtggatggtgaccccattactgacagcggctcaggggctggggccttccttgacattgctgaagaaaaggtgagtagatggtaaatttcatttgattagtcagtagtaggcttgtttgcttatttcaaacttggtgatgattttactgagcaccagagagaaccacaagggttttggttgaatagcatcaagattgcttctgtcctcatggtacagaggaggtcagagtcccagggccacagaggctctccagggatgcacaggactggtgggggatatgcagtgcaagcttgtcctcacacttgcctgtgatgagcgagcgtccaggcctcaccaatgcaaccccgccctcctgctcagttgtgaaggcacatagctttatcagccctttgagtccccttcaagacagaatcagattaactgcaggtgtgttcatgctattgtttggtaattggcttttacacctgcaaagccagtttttgaaatgctgggctccctagggtgcaaaattaaagcataaatagttttctcacaatggcccctgctgaaaacccacaacgccagctcattccttcccttctcctgggatgaaaacttaagacagttctcacagctctctcagtcactatctggtaacagtcaattttcacagatatttaaaagtcaagcccagcataatatcaaaaattcaacaaaattacaaacacagtttccccccttctatactcaggcctactgtagactaggaaactgccaggaaagggaagcatggttaggggtttcctctctattttcttacttctctctcctccttatcctcatgatctccccatcctctagagctatttttaacatctgcaggggctggcccacctggagaaatggacacagttgtacttggctggtcaaattgtgatctgggcttttggtgtggaagatgcctgattgttggaactctctcttatgggggcttttgtggttcctgggaggtcttcctgcaggggacctaggatcaaaattccatagtttgccttgtaacttctgcccgggcttccaccccatacaggttgcccagatcttctgcgtggctctttgagtacagcccatttcagccagctccctttggagagattttatcttgtctatctccagcaaaacaactgcaggacaaatacccctcccttctccatccccctcccctcctctcccctttccctctcacctcctccttccctcctctctccttttattccctcccttcctctcctctcctctcctctccccttttctcccctcccctcctcttcccacttccctccttttctctttctccctcacctccccctcctctcctctccccttcccctctcttcctttgtccctctctcccaactctgaatctaaagggctccctcctttcaccttttgtctccctggagaaaatcagacaccagtccctgagcctcccaaattccaggaaatacatacccagctcaccaaatggtttggagtgagtagaggggaggagaagaaccgcagtacactgaaaattctttccaaaggaattcttgctctccaggcactcaaccccaaaatgagtcctgtatggtttcttacacagcctagaggtaggagatgggcaggagctggtagaacgggtgccatttccttgttttagcatggggagattacctgatgcctgtgaaattgcacttgccctttggggctttagctgacgctgagttagaaagagtctcattttaacatcctgggacctcaactttcctctaactgttttttgagacagtaattctgcaaggatttaatatattttatgaaaaaggggctctgtggtcaaatgactttgggaaatgctgcactctacattcctctttttatagattctgagaaatcctgcagcaaggaaatctttttaactttgattagcctggtgttttttgtaaccaaaagaaccacatttttgcaataaataaacaagctttgggaaatgaagatagaacatagtttgctgtcaccagccccaaagctgctctctctttccatttctcccattgctatgaaaccttcagagaatctgcctgtgcattcccaaaggaaactgagtcacagggagagagaagaagcaggaatgtctctgtctcccagcctagagaaggctgaggaggacagaggtgctgcctacacatttctgaagcatcttcatgggcaaagacattgtctaatgccttctggatgggtacatggggaggtcacagggaggcaatgggtttcagtagaagtatctagagctagaccaggctgactcaggagcagtgatttccgtgttaatggaggtgcaaaccaatactgggaatcaaacaccagacataggtgcctgggcagtctttcccatccctggatttatgaaaccatagatgtgaaagtccttgagagaaagaagctacagaaatgcaggtggctggagaaggctaggcagtctgttctcaccagccacaggcatgttgatgggagcccagagacatggtctcttgtgatgcctttgttttcagaatttagcagcaacagcagcggggctggccgaggtgcccatcagcactgctggagaagcagaggccagcagtgtgcccaccgggggaccaaccctctctatgtccacggagaacccagaggaaggggtcactccagtaagtagctcagagcgcaagctccccttcacctgtgtctggggttgtgggttgtgttgggtgggagcagtcactggctttccctatgtgtctgtgaaacacagtgacagtctcatgggggcagtctgtcggagtaagcactaaatagcattgacccattcagtggcggtgtgcagagccctacactgtgctgggcactaggcctggtttcagggatggatagtaaataggatagacgtgattcctgaagacagggtggtaagaggggctgtggtcagtggtaggtgaagcacaggatgccctgggagcactgaaaaaggggcccagagcccagactcgggggcacagaagtttcctggggaaaggatgctgaaggcgggcctgagagggtaagtagaagtcgcctagcagagggggtggaacaggtgtttcagcaaggtgggctggcaggagcaaaggcctgaagcctgaagaagggcagcatacctgtggggtcaagcgtgagccaggggtcggggagaaatggctggagaggctctaaggacacagagaagattcagcagaagtggggagtcactgaagggtaagaaacaaggaatggatgtagccagattagaattccagaaagatcactctgactactgagaggagaaagggtggggaagcaaacttggagaaagaggccgggcttgggggctgtgttggagtttgggtgagtggtggtgccagcctgccctgggatgtggccaacaatgtcagatcctcccagaagtcccagtgagcaaggggctgagaaacatccattgaatttgtccattcacggtgagtggccttggggagagcagcttcagggctatcggagcggtggaagccagatggcactgggctaggaagagagtgggacagggagtggtccacgagggtagactactgcttcaacaagaaagctgtggagtctgaggacctagacttttgtttcaacacagtgacttaagcaccagtagaagctgcactctctgattaggggacacagcttggaagggctattggtgagcacatgcccctcggggttggcagggagtggctggtggcacaccacacgggtgggatgctggggtggtctcgcagcatgagtggtgtgaggaaccaggcttccatatttctgtctgatgtctcactgtgggtttccatgtgaagtgaggtcttggtgtgcaggtgctttgaggggccctggccttctgttccttaccacagtgtggtggatcagcatcatggggcactgacgcggttcctgttgactttctattcagggtccagataatgaagagcgtttagcagcaacagcagcaggggaggccgaggcactcgccagcatgcctggggaagtggaggccagtggtgtggcccccggggagctggacctctccatgtccgcccagagcctcggggaagaggccactgtggtaaggatcgtacagtgcccaaaggttgaggtcatggtgggagcagctcctgaccttctcagagtgtggggctcctgctcagcaaacccatgggagcctgaggcacggggatctctgaccaaatactcacttgggggtggagtttgccaaggcctgggtgagtgtggtgaagcccctggaggtcagtgagcagctgggccctggggatgggtgagttgcagaggtggggtttgtcccaaggctgcatgcaggaccctgctgcctccacccacagggggtgggagccagaatggaggagtggcgggctcctggagggcgatgggggatcaggcagcaggcggcaggccccagcaagggtcagagggcacggccaggccttcctagccctctcctcgtgcagcgcacagacactgtccagctcctgaaggcagggcacatcatcccaaggcacttggccagtctgtccctgtgctgtctctactatgggtgccctcaagttcttccagctcagctgattcaaacctgaactcctcctttccactcctcctatgttcccacctcaaatgaatgggaccatcatcctccagtcacctaatccagaattttcttctctcttccttaagttctatatcccatcaagcatcaagtcttgttgatttttctgcccaaacacatcatgaatcgccggctctgtcctcctccaatgctggcccctgtgctgagcctgccgtgtccccagcccgggcaattgctaagagccctgtctggcctcctccatcctctcacagcttgtctccagtctttcagccccacttcttggaagcttcccatcgcccttccctgcagacccagctcccatacctggcctgagagcccttgcagggtctggcctacctagccttgctgaccacctcttgggcccgtcctctctgcctctcagcagcacttcagccacactgacctttttctagtttctccatcatgcctctcttcctcatacctcttccctcatcatgcctcataccctcttctctctgctgagaacctttctcccttctctcctccttttaattctagcttatcctttagaattcagctcaaacaccacttcctcaagaagatgtcattccagactgtgaactctccccattcttgtcctcaaaaggcctcatcatcattgtagttgataatgaacttggcaaatagttcatgtctggctccctaccagaatgtaagctctgctagaacagagattactgatacaatattttgttcattgacatacttcattcctgaccaatgataggcactgaatgagtatctgctgagtgagtgaatggctggggtcatcaggacatcacagatcaacaacgccggcctttgatgtcattgcacacacttgtgcccctggtctgtctgtgctggtcaggcagccttcagccttttagcatccatgctgggagaccttgcagtgtggctgggggtggaggtgggggacatgcactgatggtgccacaggccactgggcagttatatggattctttcagtgaacaaagtggctgtctccttctccttcttcttcctcttccagttgccctttcctttctcctcctcttcttctccacctcccctccctttccctgtcttcccctttctttaatgtctaggcacttacgacagagtgggaaagccagggatcaggttctaccaagtcctagcttaatagaaactagaatttgaccagcagggttgtctgaagatagaagggctatctgtagaggtggtgaggtcctagttactggaggtgtatcagctgtaaagcaaagagtatttgaaacaagtctcagtcaattttggaagtttattttgccagggttaaggatgcacctgtgacacagcctcaggaggtcctgacaacatgtgcccaaggtggttggggcacagcttggttttgtgcattttagggagacatgagacatcaatcaatatatgtaaggtgtacattggttcagtccagaaaagcaggacaactcaaagtagggagggggcttccatgtcataggtagataagagacaaacgcttgcattctttcaagtttctgattagcctttccaaaggaagcaatcagatatgcatttatctcagtgagcagagggatgactttgagttctgtctgtcctttgtctgtaaggaatttccttaaggacaaattgtgagggaggtatgtacctttcttatcttagtagataccttttaaaggaatagcatgggaggccgttttgccctaagcaatttccattttcatttttccctttggcttagtgattttgggggtcctgagatttattttcctttcacatttccccctttttaaaatctttcagataaagcattttaaagaaaatgagtctctagtttcaggtttagttgatttctcatggctaggagggtttattcctagacaggtaggtcccatgttattaggaaagttcacttttatcaggctgtgaagtctcatgccctacaagagaaaatagcgggagggagaaaaacaacaaataaaaaaagaagaacaatcctggaaaattgatataggtcatattactctgaagtccatacatcagtaggcaggtatgaaagtggcttattatgtaaataggttgctgttattttcctctgaagtttaagttgtctagcttcagtttgcagggctttaagaaagcatggcttaattttagtgatttcaaaaatggggaaaaaatggaaaagaagaagaagaaaaaaatttgaaaacattattatggagacttgtagccagtacaaattttagaattcagtccaaactgtagaaaataataaaaattgaaaaacattaggcaagaccaaaatctaacaacaggtgttctatagtttattttaaaacataagttttctctttccagtcccattttcactaaagaaaaatcataggacaatttcatttgcaaattaagttttagtcttattatacttggcctgagtatttgcataaagtcagcaaaaatagttatttgccatataggctcctctttttttttaattgactttgctggagctttattccataaagaatctcagatttgactttaaggccttaaggacagcccatgcctgcaaatacctgtattaattgggtgaaggcctcaccttgaggtctcaagaaaacttggggctcctggacctgtcagaaagtgacattctttacttaccacaggtcaggaacctgtacagagattgtgtagacaaggtatgaggccagctttcccaagggcttttattggctctataaatcaactttggttccttaaaggagtctgtatctgatagcatgccattccagtcaaaaccatggtaaaataaccagtgtctccagctgtgctctgttacaaaagaaaacagattgttatcacacttacacaaataactatattgtaagttaagaatactcacaactaattaccaaatttttggagagatcaggtagaaatatgctccaaattttgtttatatgagtatattttactcatttttttttgaggctgagtttctctcttgtctcccaggctggaatgcagtggcatgatcttggctcactgcaacctctgcctcctggattcaagtgattctcatggctcagcctcccaagtagctgggattacaggcatgtgccaccacccctggctaatttttgtatttttagcagagatggggtttcaccatgttggtcaggctggtctcaaactcctgacctcagatgatccacctgcctcagcctcccaaagtgctgggattacaggcatgagccactgcgcctggctactcaattgttaaaagctgtaaatagctcaaaagaaaagttttcttggctccgataaacaaacaaaaaaaggatcagcaatgttttaagcaaaaagttataaaaggattttcagtcttctaaaagtccacagttaactcctgttctgcatgttattcatgaacatttcagctcttcatgggagccttggaagttttttctctattctaacattacaatcttcaaaacttgcattgaagagcacctatcagagtcctatgccgattataaaaccaccttttgaaagggataaaagcaaaacaactgtggatgacaaaagtgttgaaacagtcatagttaaagacacaattgacaaggaaacttggttacttctgtggcatacagcaattttacataataattactactgataaaatatgctaaaacatatcagaatcacaggaatttcatacaactctgagcacatactaataacacatttatgtaaatataatccaaagaaggttaaacactgtttcatatttgaaaatacttcctgtatgattttattatatcgaataagccaaatatgtctcttttggacttcaggggaataatagctcagaagaaaagctttcttggttctgaaaatcaaaaaattaatgggacctaagttagaatttgactttggaaattttgtcaaatataaaaagtataaaacacttgatatcacaaaataggatcacaggtcattgtaaaataagtcattcatttagccaaagtgatacctcaaagagttaaaaaaaaaggcaaaaatatttattctttgattgaagagattgatttctcaaacaattagccctaataaaaacaacaggaggccaattaaatttgtttttcaaaaatttttaaacaatctataaaattttaatcatcttgaccataagatataatttccataagcctttttataacctttataacctttattaaggagtgggttaatgctccaagaaaaccttgttaatctgacacaggggccaatatgctggtcttgcatcagcatgcctttgacattaatggttaatttatagagaaactaaacttattttatctctcaaaatctgcccttataatctcatgtgcccacctcttctgcagtagtctttggaccttgaggagttgaatagctttaatttttggcgctatgtctcacgaacgcagtttattttggttgacatcttctacaggatctgtaggtgaggctttaactgctgtcagtgtttaagatttagcaggacttggtgtccttcttagacccaggaatcaaagccctgtaacttaatggcacaagtactttaaaagcacatacagaaatgtagagcacctgattctgtcactgttctgggcaccactatgtaacctgccatgatccctggtggactgaacaaatgggggcaaatgtgggaataaaagacaagagacaaaagagtatatttggaagaaggggtcaggggaaacttgcctcttgtggacaagggccctgagctttacacagccctccatatttattaggcaaaagagacagtgagaaggggagtggaagaaggggtcagctgcttagtccagagtaggcttgcaagactgcattcctcaaacaacaggctctagatgttgcagtagataacctcggcacccgggagtgattgcctccagcaaaccttctgtcggcgggaacacttgtgagtttgctcacatcctgcattcatgataaacagtttgctgttcgatcatatagcctccagtggaatgctgagttggtcacgtcccatgggccttcggctcccttcacagaaagttatatggacgtaataaccttaattaaaaaaaatattctttttgttaatctgcatcttttctaagcaaacgaaaacttagtaataatgacataggaattatttagataaagtgtaagatctgtttattaggccagttacccaaaggcaaaagaaaagaccttctgcagtgcgactgctgttctctatggggaatattatattggaagaaaatactccttttagatctttaagataaaacatttttttagcatcaggccacaacatttataaccagaggaaaaaaaatcttacaggagctgaaaatgagttgaagattagttattatttcaggccttttaaaaggcgagagaaaacagaaaagagcaagatgcaataaaagtcgaactttgtgtaaaaaaattataatgccttgtaatttattaagagtaaagcaataccttaagaaaattttgtagttcaaaccaattctttagtgtataagtggttttttaaaaatcaaaacccaatctctggaaagaccattttaaataatttccctttaattgtagacaacttgctcatatgaaagctttttttttcatctgtcttcttcttatgatgtaaacagaccatttctgacatgcttggactttctagttttcctgagcatccctctttctgaaaaaaaaaaaaaaaaaagtcattttattctaggacaaaatttaccataaaagattctttcttgtataaaattatttttctttaagctttcttaccaaaattacctctttatttctataactttctttacatctctctcatttcctgattcccttcactttgttttatacataacctttaaataagctttgaatgagacaaaaattattcaccttttaaaaaacacacttttttttagaaagaatgttttcttacaatatattttttaattggaatatacccaactaatgaaatatctattatttaatttaactttagattctaaattatgacacatttgtctataagtatttatcccattacatttacctaattatttttaatactgtacctagattactgtatttatgaaaactgcaatagtcattatttaaagttatttccctgccaaccattttatagcctgtgaatttcaggtgtttatctaagtagaaccttaagattaaatatatggttattttactaaatcaagatttagctattttcattaaactaatgttcttgtcttatttatcagacagtacacaagcaaaggttatcctgttttgggctgagtttatagttttgtaacccttgtgccaaattttgacaccttatagtatttggcagggataagtatgaaattgcttgatcaataaatgcaaacaaaaatgtatgctggcaattcttaagacatttctaatattgctttaccagtaattttaaaactagcttattaaagacttaagtcgtgtgaacttgaaaagcatttgggtttatcatttaatttatgagtactctttaagccattgtcataccttgtagcgaaaaacacaacaaaatgtgtatgtacacataaacacacacatacatactcatacaaccaaaaatcctatagcttttacttcagaactctagccatgaaatattaatacaaacacattgtcctgcagaaacaataacaaaaataaatgtctggatgcaaacagtggattttatctcaggagaaatgtaacagcagacttaaagcaggcagaggcagagaagaaagcagagagatagagaacttaggaactttatagttgcagatcgacttttgggctctgaatttttcttgctgtaattgtgcatgaaaataccatatatgttcattttacaaaaatacttgcaagaagaggcaccataaaaccaacagagtgcctgaaagagggtcattctccttgtttttccttattcttagattatttgtttcccacccttttttttttttttttttttttttttgagacggagtctccctctattgcccaggctggagtgcaatggtacaatctcggctcactgcaacctccacctcctgggttcaagtgattctcctgcctcagcgtcttgagtagctgggactacaggtgcgtgccaccatgcccagctagtttttttgtatttttagtagagacaggttttcaccatgttggccaggctggtctcgaactcctgacttcatgatccctcccaaagtgctgagactacaggcatgaaccaccgtgcccggccttttttatttatttattttttattttaagggacgaactgagctgtggcctagcattttagtggagtgtgtcaaagtgtgctggttgcgggtgagactctacagtgtgtcaccactgagccatttccaccctcttacgtgtctcagtttctctctgtgtagttctagcacctccaagaggctcaaaatcaaaatgcagggtgaccagctcctatatgcacttcctgaatgaggctttttaaactaattttgttgggggttccctgtagggttgctgcatgtcatgggggggtcaaccccccaagacactcccacttgccctccagtcacccaggggcacctttcagctgggaggtgcaaaatgccctttctctttgaagctgaggaaactcattctcccatttatctgtgaaaacaatagttcaattcctcatgcaaaatgctcacactagccaattgagattaatttcaggaggaaaggcaatggagaagacaccctttagaatgtacctctgaactagaattagggtcctaaacaataacttcctaggagaaaaaaaaaaaaaaacagctaagaccacttcctgtaaattgtcctcagccacctctaactttgtactctcatccaccattatacacactaaggtcaaatcctctcccggtataaggtaatctctggtacccccaaaagccaaagaggtcaggtcttacaatacaggagagcagagcttcagacctaagaagaatctgctcatgactcttgaaactccacaaagaaaatggaacaccccaaaaaggggcgggtggtgcctttgttctgaatactttaaggggtttgagtcattggaagcctcctctaggtttttattggtactaaagatagtgaagggggaaggaggtatagggcggaagaaaagtaaacgaaagaaaaaaagtttttaagacaggaagcaaggatagcaaacgtgcatgttgtgtttttttttcccctctcttgcagctgtgagaaattttagccaattcagagaggtcttgttacccataatttagaattctcattcagatttgaccaagtcaggtagagctggtcaaatctgatgggagaaagatcagaacaacaaccaaaaaaaccctaacaacatgattactgagcactttaatagtaaggagaaattaggaacagctggttgttaatcttaacttcagctaagacaaaaccccaattcagctacttactagagataggtcttaggcagaagattgctctctaccatcctagaagcaggaaagaatttaaacttgccttccctgttagaaatgagctcaaactccagaaaggagttaggtgccttccatcatcctagaagcaggaaaacttgcattccttgttggaagcaagtaagactgcaaaaaaagaattgtacagcaaaataaactttagaacttgaccaaattttgggagatcagggattctctggaggggaggctcctaggcctcagcaaattgtcctattggtttgaaccataaagaaagctcaagctggtatcaagcaccgatatgagatttgtcaaaggtcagtggcacctccactcagaatcccttcttggttgccaaaatgtgaaccccaaatatctgagacaggtctcaggaaagttaggtagtttattttgcaaaggtcaaagacatgcccgtgacacagcctcaggagatcctgacaacatgtgcccaaggtggttggagcacagcttggttttatgcattttagggagacatgagacatcaatcagtatatataaggtgtacatttgtgctgtccagaaatgcaggacaactcaaagtggggagggggcttccatgtcataggtagataaaagacaaatgattgcattcttttgagtttctgattagcctttccaaaggaagcaatcagatatgcatttatctccgtgagcagaggggtgactttgagttccatctgtcctttgtctgcaaggaatttccttatggacaaattattagggaagtatgtagcttttttttatcttagtagctatctttttaagggctagaatgggagacagatttgccctaagtagttcccagcttgatttttttttccctttggcttattgatttggggatcctgagatttattttcctttcacaaagctaaggccagagaagtgcttagcagagatgtgctagaagggactctggggtgggtgggaggatgccctgaaaggtacgttctaatgctggagctccaggcgaaggtgtggtcctggaggagcaaaggaaagggaatcatggagcctccagttatctgaggctttagcgctttccaccccccagcctcacacccactgaaccaggggcatgggcgaaggggcacagctcctcatgccaatttcatttcagggtccaagcagtgaagacagtttaacaacagctgcagctgcaaccgaagtgtccctcagtacttttgaggatgaggaagccagtggggtccccacagatggcctggctcccctcacagccaccatggcccctgagcgggcagtcacttctgtaagtgtcatcttgtgtcctctctggctcacaggggagagacaggtctgcatcatgcgacaacagtcatccttggccttggcaggggcacctgtagcttggttatgagcacatgtctgggtgggcagctgctggagggaggcaggacacaatgctggagtgtagcagaggccacagccctgctccctcctagccttgcccaagaatttactcagagacaagtggtccacagttggcactgaggcttagaagagatgcatatttcagaaggggtgtgctgggggtaacgatgatcgtaggtaagaacgtgctttgaaactgggctggcaccacagaaacgactgttacaactccctggcagcctcatgagcgaggtgaggtggtgccttaatgctggttttgttttcagggtcctggtgatgaagaagacttggcagcagccacaacagaggagcccctcatcacagctgggggtgaagagtccggcagccctccccctgatgggccaccgctgcccctgcccacagtggctcctgaaagatggatcactccagtaagtggcatagagctgtaagatttgacttggcagaccttacaggggagagaaagaaaggccagagttgtgggaagggctggcccccagctttctcagaggtaggttttcatgttggtttgcaaatttgggcatttgaggagctttaacctgaggaaagcttgaggaaactccagatcatagagaaaaagcaagagattaaagtcaaggggacctagctttgtgtcccaaactgatctttggattgaaatgagatctaacagtcagtgttcttctggggacaaagttgacagtaagacgtggcgggtctgtagaggggatgagagcatcagtgctgtgtgtgtgttgggggtgacctccaagtccctgccaacatgagtttttatgactcttggctacaactgtgtgaccttaagcaaatccgttgatttctttggccctccgtttcctcatctgtgaaaatgagtggctgcaaggccaagtcagagaatgaatgcaggttggagaacgtttacaaagctctgtacccacacctagggttgtcaccacttaaggactataactgtgtctcttagaaataggaaacccagacctggccctcagcttgggcttgtgtgaagagggactgctcttccaatgtgaacacatttttaaaggaaaatatctccttggtgatcagcattggctcatcagttccccaaacaccacttggtcatgcacactttgaaagccaccactcaagctacagtcatgtggcccattggccacggtgcggcaggactgacctgtgaggggaggggctgtgggacgggagatcaggacagccccctgaggtcctgaatgccccttgctccggggcctcctatagcggttatcacgctgcttcctgtctctttagagttgtcttgcattcattcgttgattcactcattgactggacacatagcggctctgggccctcagtcaggacacttgtagatagagatgaatgtgacctcactcctgtccgcaacaaattcacaatcaagcggcaggaagtaagccatctgaactgacattgattaatcactctgtgctccaagtttacctgattctcttcaccacattcctcttcagtataaggtgaatgggagataagatgtggagaggtaaagtcacctgccactgttgcctgcctctgagaggtagagctgggatttgaacctgcatgctggcctgcaaagctggagctcttgagcttcacccagctgaagtcctcatccatgagagtgtggtgtggtgggaagatcctggactgggggccaggagttcgaggttctgcttccagagatgctgctgacttgttgtaggccctgggcctccttgtcatcatctataaaaggaaaaaaggtgaagaacaactctggtttttaactctggtcacgcattagagatggctgggaagcttaaaacaatgcaggtgtctgagtccagtgctagaccaagtaactgagacactggggctggggctttgggcttgcagggcatctagtgggcagccagctctggattgacccgctcatgcactgtgacttcccaaacaatgtccccctgctcttctgcacctcaccccaaggtatacacaaagcaccaagttcaaatctccctagtgatgccacatcgggcacagatagagccggttctcctgtttctttctctttttaacgttttattattgaaaacctaaaaatgtcacaaaggagcttagacaaaggagcttagaatagtataattaacccccacatacccatcgttcagtttggataattatcaacactgacaatcttgcttcatctgttccacctcctaccaccatcttttttggagagaaggggaatactggagtattcaaaaatcaaccccaaacatcctatcatttatttaactggtaaataattcaatgtgtatggctgatagagtgatctggtacctttgttttggtcatagccatagtatcacgatgcatctaacaaaatgagcaggggttccttcgtattatctaatgccctggctattttgttttaaaatacctctttccagtttgtttgactctgaatccaaacaaggtctacacattgcatttggttgatacgtctcttaagtgtctcttaatctctaattgtctcccgccttctttttcccttttgccattaatctgttgaagaaactgggtcagtttcttccttagacccttgatgttttcagctttgagaagtcagtctggtaaggctggctgtgctcatgggagtgtgagggttactgctcctgggaagctctttgtccacatatattaacaatcataagagcgcatattgctgaccagaaacttctcttctaggaattgattctagtggagatagtctgatagcctttgttgttgccgctttttaaaaaaaggctttgtttacaaggatgctaatctcagtgttgtccataatagagaaaaattgggcataatttaattagccaacaatagaagattaattgaattaaagtatattcaaacaatggaacattatgtagctaataaaattatacctgttagaaatatttaatgatgggggaaatgcttagcatataatgttaagtgaaagaagctggttgtaaacctagtatattgtgtggttaactatttaaaaatacacacatgcaaaaacactagaaggaaataccctctgtaaatgttggcagctgttgcctcaaagtggtggaactgtggaaggttgttaggtttttaatacattgtggtttaatacattttctactatggtggcttacaatttttatgatagattttttaaagctctgagaaggaagagagagagagagagacagacacagagagagttagagatagaatgagagagagaaacggagacatggttgatgtctgatgaagacattcctgctaagtccccacgttagggatctgcaatgaactcagatgaatgccccgattcctgagcagagtctaaaagcacaagattgtcaagaaggcacccaccttgggatatctctaggatcagtttttttgtttctgtttttgttttcttgagacagggcctcactctcttgcccagactagagtgcagtggcgtgatctcggcttactgcaacctccgcctcttaggctcaagcgattctcctgcctcagcctgcagagtagctgggattacagacagacatgtgccgctactacccggctaatttttttgtttgcttatttgtttgtttttagtggagacaggatttcaccatgttggccatgctggtcttgaactcctgacctcagatgattcacctgcctcagcctcccaaagtgctgggattacaggcgtgagccgctgcacccgtcctctaggatcagtattggcccagcctctaggatcagtattggcagatatgtgacagagccaggcatgctatactgccatggtgactctaggtcagtttgaatctcagagtcaccatgacagtatagcttgcctggctctgctacatatctgtggccagttttcttcacttctctctgtcacagttgactcatgcatcaaatgggaatcataatcttagaacctacctcttgatttgtgaggattaaatgagttcatccatggaaaacatgacccagcacatagtacatgctcaataaattagctgtctagaattattttgcagatgaggcccagaaaggattagagctttgctcctaggggtccagtaggagtgagagcctttgtctctggattttttagtgctttggttttctgcactgtttacaaccactgtcttcagacgggagccagaagttgattagcaaagcccacactggtcacaatgatgtcattacatttctaaggactgactaatagatcttaacaaatatatggagaatgttgccctggaaatgaagtaatatatttaaaaatctgtgttgtggaacacaagtgagagagaagactgattgtcaggtgtgggtgactccaaatgccaggctcttcccactagtcatttggcaaataggtactgagagcttattatctgccggtgcaggggatggtgcagtgatcaggcagcctctctcttcatggggctcactgacttcagcccagtacaagccctagctcatgcccagctcactgaccaggaccagggaatgtcatcggaactcagcagccccatgtcccaaatatgttgtggccacgttttaaccaaatcttcttcttttaggctcaaagagaacatgtgggaatgaaaggacaggctgggcccaaaggagaaaaggtttgtgctgtgaccatcctggggaacactttggctcctgatcaagtgtcctgaacatgttatttaggtttgatttagcccactctgatcaaggggatcgcagaagcagcaagagggctaagcccaaaagaaatggacttgtaggtctgggagaatcaggaaaagggcactgggcagttctgactgagtctcttctcaccacctggtgaccgtggccaagtcccttgacctccgtgggccttggcttctctgtcgagtatcaaagggtcctatgattccacacctggctctgccacacatctgcaaccagttttcttcacttctgtgtccgggctctgggctctgcccctgattttcttcctgggaaaatgttgggcagacaagagcttttgaggaccacaggcctaggtttgcctttttgtagctgtgggatctcccgaaagttctttactatttctttgctccagtttctccatctgtaaaatggaggtggtgatgatgaccctgcggtgtgggatgacgtgaggggatgtttatagaagtgctttagctggtgtcagtcactgcgggaataacaaattcctcttaccaaaacacctattggtgataagctgttcccagggggatgtgtccacagtgaccccagtcaagagatcctgcccagggagcctgctctggccataggcagcagcttggctgcctctgggagccttctcatctccaccatgaccctggtcctctgcctgtctcacctccctctgggctgcacagaggccgttccttgcagcagatgatgctcccgtcctggggcctcctgagtgcccaccggggtgtggggaagggagggccagggctggggagggcggtgtcctcacttctctctgcctctggctacctcagtggacttcagatggagcagggctctggggtgtagcaggaggcacacagatttggggactttactgtggacatttcctctctccttttggtggatctggccatcctgtcaccttatttgtcagagaagccacttctctgggccctttttgacagccaaaacctcctgggatgccactctgtcattttctttcatctgcctcttttccaaatgtgtgcttctgtcattcgaaaagcattttctggggcactagccttgtgccaggtgctgggacctggaggtgattcaggcactgtgcctgcccttgaggggcacatggtcccagaggggcagactgtgagcaatgatgttcctgtaaaggtcacacgccctggtgagaggagcaggtgggcagggcaggcttcaggggagtccacactgggcctgagcactgagcactggtgctctagcagggcccagatcagagggtggggataaatcctggaagaagggagggtgtgtgtgatgcgtgctcatactggtcagctctttccaccacagcctgtgccctccaagtatggcacagaaacaaagggcttctgagccctggggtgggacaaggcattcccttaagctgtctctgcaaaggacaatgccatttttctttcctgtgtgatcctgattttaaagatgagcacgatttctacagaaaggtggggagatggtaggaacagagttccagccgttcactgaccattttgttctctttagggtgatgctggggaggagcttcctggccctcctgaaccttctgggcctgttggacccacggtgagattcccatccaggcttgtcacacacacaggtgtaagaccagggatgcggccaaaacagccacaggctgaggactctcctttttggcccccaaagtatcttgcagtcagaccctagggctttctgcctctactaggactctgcagtgtgcagcagcagaactgatttctatccagtttaaatcctgcaccttgagcatcccagaagttcttcaaactcaacacttcccaagctggactcattacccatgccccagacctgcttctcctcctgggttccccatctctgaggatggcaccccatctatgtggtcaccaagagagaaacatccttgagtggtcctctgccttccccagccctgcccagtgtgtccccatgtccccctgagtctagctgtgcagtgcctcctcctcctctcttgggcgatggcaccagcctcctaactggtctctccgcctccatgtcaccacttcccttcccccacacacatgttcccaccactgtgaccttcctaaacacagctgtaacccccaaacccagctcttctgggtgcctctcagggggtgctcagtacacacacattcaatgaatgaattaggccctgcctggttcctgtcttcaggagttaagtgctggaaaggtgttttgaagattccccttgttcttcagatacatttgatgccattcaagtatgcactgagggctctctgggtgctcggcctcctgctggactctgggcacccagtgtgtctcaggtttgggctggctcttgagccctagtttagaggagccgatggacccacgcacaactaagcttcgagtcaggtggtcctagcatctcactgagaccttgacagaggctagtgggagcactgtggagggagagaattctgcctggaaacggggtagggagggcttcgtgtaggaggagactgcggaactgggccttgaaggatgagttgggaattgaaaggcaggaaaggaggccgaggacatgagtgggctgcacagctgggaggcggcaagagagaagggtagctgtagaggggagtgggagaaaagtcagagagaaaacggggagcagaagttatcgggctataggatataggaaacatttccccattttggagaaaactcagtgacgtggctgtccttggagtctggcagttaaatgcaagtagtggaaatttcttctctttccaggcaggagcagaagcagagggctctggcctaggctggggctcggacgtcggctctggctctggtgacctggtgggcagtgagcagctgctgagagtgagtgtgaaggaggacacgacctggtgtctgggactgccttcaaaataaccccagagggagggacgtgggggccagggacagatgaaactggattggctgctgctggggttgccggcagtgagctcatgggggttcattctacttttccttgtgcttgtatatatgtttgaaattgttcactttgatcagttgcattgtaagtgagtacgagcctacatttatcttcaggacctcctcaccccaccttcttcctttccctggtgggcttcttgagcaggctgccctgcagcaggtgtgcccagtgcccttcacctctgccaactggctttcaatcctccctccccctcctctcaccctattcattaaagagacctgctggttttgtctctgggtggctattctacttcagcttccagaaccttcctgaaatctccttcccttatgcattccctccctgcctccctctccaggctactctttctctttggtgcctcttgctcccctggcctcctgccaaggctggagctccaccagtcctttctgaaattgccccctggggagcttctaccttctctagctgcagctggtgcctctgtccctgagagcctgtgctgaatccctggttgaaagctccacttggctgcccctctgcccactcctcatggccagggctagaagggttctggactccgtggttaaatggaatgggagccaaatgaatctcccagcctggtgggatcagccaacccagcaatgggctaaaaacactagtgcacttcagaaagagttttaaaaacaaggctacaccacaagcagttttttttgtttttttgtttttttttttttgagatggagtcttgctctgtcgcccaggctggagtgcagtggcgcggtctcggctcactgcaagctccacctcccaggtttacttactccattctccggcctcagcctcccgagtagctgggactacaggtgccggccaccacgcccggctaattttttgtatttttagtagagacagggtttcaccatgttagctggggtggtcttgatctcctgaccttgtgatctgtcctgactgacctcacagttaatcagaaaactaagttcaccagagcacctctcagaattccaactaattggatctttcttgtattcagccttttgggagaaaacacgatatgatgggctcagaaagactgagattcaaatcccagttctgctactaattagctgtgtgtctgagagcccttgagtcgcatggtctcactgagccttattttccgcatctgctaagtgggatcaccaaaccctacatgtaggattgttgaaagaatttgagagattgcatgaagcacatactcagtatctcattcggtattcccccactgtttctaacagagtctttgtgtttttagggtcctccaggacccccagggccacctggcttacctgggattccaggaaaaccaggaactgatgttttcatgggaccccctggatctcctggagaggatggacctgctggtgaacctgggcccccggtgagcaactgaagtcttctccccatctctgtggctgtggggcttcctttagcaggggaggggtgtacagattgcaaaacccagcactgtccaaggttcgcgatggggagagagcagctagctgtttgtaaacagaaatcctcctcatctgaatcattgctgagattcgaaagaagcagcagccaagaaaaacatcatcctacgtattgttttgctgctttatcatagtcaatacagatggccccctacttacgaatggttcagcttaagatgtttttgactttacagtggtgcaaagtgatgcacattcagcagagactttaccttgagtacccatacagccattctgttttcactttcaacactttattataaaataggctttgtgtttgatgactttgcccaactataggctaatggaagtgttctgagtatgtttaagttaggctaggctaagctatgatgttcagtagattaggtgtattaaatgcattttggacttaagatattttcaacttgcaattggtttatcagatgtagccccattgtaagtcaagaagcgtctgtacaggagacacagattcataaagaatcttggaatcataggccatcagggctgggcctggggtaggagacccttggagaccatctggtccaaccctgtctctaacttccccatagaggaggaaatgtaatccagagagtgaaggacagttagccacaggtgcacagtcagcagtgacccagcctgggccaaggactaggttcctgccttgcacctgacatgaggccctgggcccaccagcctcacctgcctcccaaccctgccctccttttctagcaagcgtgtgtatgtgatatttagcagaaatgttgtgggttgattgtcactgatgttccccagggccctgagggacagcctggagttgatggagccaccggccttcccgggatgaaaggggagaaggtacggggaacacgggagggtcccaccacatgggagccaccaggcccacactactctctctgacccctaaacctgaccttgcctcttatgtgactgaccccctggcctcctgaaatcccctgctggccacttctgctggatgtctccatcatgggactcatcatgcccaagcctgaactcagcaccttccctgcccactcttgtctgcccctagcttcagtgaatggtgttgccatctacctggtcacctggagcgagaaatggaatcttctctaactcctccttccctccctttcctggtatgattggtcagtgccaagatggcccagtctgacctccacatctctcacttttgtctccccactgagctggactcatctcttctcattcgcacggtggccttgggctcccagttgctgtcccattctctccacccaccctccagcctcctgcccagttcaccttcctgtagcaggctctcgtcagcccctgccctggctactgagaaaagatcaagggctcaactgcctgcaggacacaccctagctctgtgcagacatctggcccttcctgattcgcacaagctgcctctgtagtgcatcccccaactcctcacacggcctcttggccagtgggctggttctgcccaaatgctctgggcacgctcttcccttctgtcctcctggcctttgcacatggttttctccctgtttgggatgtccttttccttttgtcatcctccaagacccagttcagatacatcctctggggagctctccctgactcattatgagcagaaagcacccctccttcctcccctttctatgagcatcataggaagttcccatgctattgagaacctcccttgccagtgacactaaaggtgttagcttacctgtctgctcctcacccccaccctgacatagagcatagtactgcctctctctccttagaacctagcacaagcctctattagtgtttgatgcatgaatgaaacttttttcagacaccattagtctacttttcccagagtctggcctgccttcatcctcttcattctctgtctgtaagctggtcctgcctcctgtctgcaagcctgtgctggtgctacctggggcgtgtatgtgtagggggtgctttctgcctctgcagtgttcccagcttgatgagataagccatgtctgtcaaaggaaggcaataaagacaaggtgagccctgtgctagggatgcgatcagtgggttttactggggtctagaggaggaagagagatctcagctgggatcagaagtggggccttctgtgaacctctcatggacaaagacgtggaaaatgctgactctgtagacaccaccatcatcactgaactgaatttctagtttccgtcagctctggagtatgtttattttaattggaaccataactcaattttcgtggaaagcttatttctcagaaaaagatacaattgtcaagctttatagaactcattttacatgtaccaacagttttacagaaattaaattttgcaggaagcaccacagacctacactcttcttacctgttcttcttccaggcttccccccacccacccacacacacccctcccatactctgtctcgaacttaaagatacccacacccacaactgcatacaaaacacccttgcacaggcactctgcagctgcttgaagaatcagcagtgcaaggagcagcaggcttgcctagggtgaatgttggagatcaatcacatttgtttctgaaatttgctatgcatctcaatttgttgcactgtgcacatatgaggttttctgatcaagcaaaaacagacttggaagaacttggaaatttgcatctggagagctggcaggaaactttgcacatgatatttaccttaaaaacaaaacaaaaccaaaaaagtccctaataaaccaaggtgcatattcagtatgtaaaataacaaaaaatgtgctaaaggaaatgaacagcttcagggctgtagtagatcataagatccaatgattcgtttgatctttgactccccatcaacaatatctgcccttcaacttgcatacctccagtgacaaggaactcatctcctgcccaggcagtgccttgcaccgttggatagatccacttatagggaagtctttccatttgctgtggtgaaatcagcctcctttctctttagcacagcacatagaccaatctaggcagttatctaaaatggagttttctctacaaagaataaggttcaggttatttagctggaaaaaaatgttttttatataataattattattataaaatatgagattgagatcaaaacatgatgctcattaagaattcatcaaatatcttaagtatgagctaagctatgaggacccaaaggcataagaatgatataacaggctgggtgcggtggctcacacctctaatcccagcactttgggaggctgagatgggcggatcatgaggtcaggagttcaagaccagcctgaccaacatggtggaacttcgtctctactaaaaatacaaaaattagccgggcgcagtggcacaaacctgtaatcccagctgctcgggaggctgaggtgggagaatcgcttgacccgggagccagaggttgcagtgaaccgagatcgcgccactgcacttcagcctgggtgacagggtgagactccgtctccagaaaaaattgaaaaaagattgatacaacagacttgggggaaagggtgggagggagtgagggataaaagagtacagattgggtacagtatacactgctcaggtgatgggtgcaccaaaatctcagaaatcaccactgaagaacttactcacgtaaccaaataccatctgttccccaaaaaacgtattgaaattatacaaattaaaatattttttaaatgatacctcaaaaagaatttatcaaatagattattctatgctgagttcgatgatagaaatattccttactttatttttcccaaatcaagatgatcaactaactcttaagatctttagcccaagaaggaatgggtgaggagtagcctgctttctcagcagtagaatgtttctagaaagaatgcagaagaacttgctgaagaagatggatctctgaaaaatcattcctttctgcttttgcactgcagattctgccattcagttctcggaacacacctagtattaacagttgttgttgattttctactttcagaatctaagtcattcatgttattctgcagtctcaaaaggtactgggacacctgggcaggaaagagtttgtgcttggaaattttcttcagtgtccagaattactgtggaatgctgaattgccagtaattgcctttgagtaatttcactgagctgccaaactgtcattgtaaaatcagcttctgtcttttccgttgatgtaagagaaatacaattagatcatcatcaccttccctttctccaagcaatcccaattggtctttgaacaattctctaaaccttgtataagaaagaaaagagaagtaagctgcttttgcctaggatgcagtaatgggtttagaccttctaacaacatgtttaaatgaaacactgaaatagttgcctaatttcctattttatatcttctttcattatcagaagtgtttggttcaacatctggattataggcctccataaaaccaaatagatggctgggtacggtggctcactcctgtaatcccagcactttggtaagcctaggtgggtggatcacctgaggtcaggagtttgagaccagcctggtcaacatggcgaaaccccatctctactaaaaatacaaaaaattagctgggcatggtggtgggcacctgtaatcccagctactcgggaggctgaggcaggagaatcacctgaacccgggaggccggggttgcagtgagccgagatcgtgccattgcactccagcctgggcaacaagagcaaaactccatctcaaaaaaaaaaaaaaaatcatatagaccatagtcaattgtaacagaaaagaaactggttatcagtattacaaacagcagaaggaaaaccaacagacatccacaaggcagtaagatgtgctgtctcagaagccacacaagcaaaaagaatcctcatctccattaggttctttgaggttcctgtgtgctgaaattgagtaatgtccttagaaaatccaattcaccacagtaagccaacattttgaatcaattctaaaccacgatgttgtaacagacggcactattttacctcattcctttgcaatgtttccattagtgaactgataccttcatatttcatcacttttaaaaccatacttgcagctctgctatttggaattccaagattgcatgcatgccctcactgcacaaaaattctctcactaagaaataatgtacaactccaacatcaccattttgggaataggagccttccctcagcctgttcattggagctcctccttttcaccctgcctgttcacataagttccagtaaagtggactcttctacccacaagttaatctactcgtgttccaagctgatggccatcttatctgtgagtcaatggaatggattcagatactctctttttaccatgtctaagctggataaaatcatctaagaccataaaccaaggcccatgatatcttctagaacttcctttgaaactctataagatgccctcttgattggaaaggaatgaggaaggcaactgaaacaattcagtttttcactttatggacataattttctgtaacaagatcagccggccatgcagctacaaggtttttagagggaggctactttagtttctgtttcacaacaatcctgatggtagtttgacttgttactgaaaagatgcacaagattggcactttcattaaagacagtttgcaatgggcagccagcaacaagccaatcatacccaagaggagcagacatagcaactgtagcctctgggttaggctataaaattggcatccagttattggagtcatgtttccactgcaggtggaaggtcacacttagtttctccctggtgaggctggccagcagggaggtgacagagcctagtcgctgtcacttctttcaccgagcacaccttctcctcccatctccccagaatggctggagtgtccctgctggctcctttgccacagaggcaccaactttccatgaagctgcccctggagaccttatggagggctttgctcgcagaaattccttgccactccagcctcagagcctgcctccagagcctggtgcctcacctgggagcccagaccaccctcagcccctgtgatccccattcctaggccaagaactgggtagtgtgtcccaataggaaaacactgcaagagatgggacccttcccatgccccacgcatgcccccaggtgagaggcatttgtcttcctccagcatcaggtggaaaccctcacctagcaaacccatgaacctcacccatgggagcagccagttccgtgaggaaggttatcacaactaccaagcaaacagcatgggctcgagtctgtgaaggagaaagggggagattgttgcgtgggggttgcctattgtgtgcaggcagttttgcggacacgtcatggcctcatctttctcatctatcctgagagctttgcttaggctcatactcaactagagtcccaaagtttcagagctggaaggaacctgcaaattgctttagtccctggttttctgtgccctggcagagccatgggactttgtggaagtgccttcgggctggtaggtgaggacagaacaactctacttcaagcatttattaaaattaaaattaaattgtaattataaaagtaatatatgaatatagttttcattgcctcatgtgtcctatttcctctttaattatttttgttagagtaggtcctccagtcatattttcacagactgtctgtagatggcaaactttctgagaccctggattttttaaaatgtttttattttcttatttggttgagtatagaattctgggttgaaagtcatttgcccttgatgatttgaagatgatcaccatcatcttccaacatccggtgttgtcagcacaaagtcagattcactctggttctcactctattggaggtcatctgatttttctctttggcaaatttggggatttattgttctttattcttggtgtttaaaaattcctctgcattgttactaaatgtggattattgtttctattttatttttattttttaatttatttttatttatttattattattttttgagatggagtcacgcagtggtgcgatcttggctcactgcaacctcctcctgggttcaaacgattctcctgcctcagcctcctgagtagctgggattacagatgcacaccaccacacccagctaacttatgtatttttagtagagacggggtttcaccatgttggccaggctggtctcaaactcctgaccttgtgatctgcccacctcagcctcccaaagtgctgggattacaggcctgagccaccaagcatggccaatgtgaattattttttaaatgtattctttcatttatccttcttggtactctatggactttttttggggggaggggtgccttttaatctggagacttctgtgttttttcagaaaatttaaacactgcattccttctttctctttattctctcctctgccactccaattaaaccgatgttggaacttctgattgtggcttctatctctcttactactttgtcattctgtctaggtctttttaccctcttgtgttgctttctgggagaattctgtagcttgatctctgtattaattctctctttaggtgtgtctattctgttatgcagtccttctgcagagttctgcatttcgacagttttctatttataatttccaagatctctaattggttctttatcataaccactgtttttatttcataatagcttgtctttgtgtcatggctatgttatcctaccttttctctgtgagaatgtgtgtcttatactcaatgtcctgattgaattgttttcttaactccatttccttggatgtaaattctgtagttgacttagttgtttctcacagtattgccttgcctcagatgtttgtgtttctttcttgtgtgtttacttgtgaaattgggatcctgcctgagtctgttttctgcctctgttggtgcagactgttgggaggtgggcagtagccccttctgagacatgcagggttcaggaaggggatggaaggaataagatgtgccatcaggcagggcacctcagcagctgatcttccgcgtgtagggtgcccttggacctcacagagtttcctagtcatctggggctctgccctatgtctttagcccaataaacaactgttgttttctaaaattaaggtatccatattttctccttggcaggagtgagggtgggaggggaggggagatgggcagggctggacagctagcctgctgcagaatttcaacctatctaccttctggggcccaggggccacatcatgcacctgacttccatcacagcttcacagcagacttttctccctgtggtttctcttgatggctgaggcccctgtcttcaacttccctgttttccccttggcatttctattttggatttaatgccactccccatcttatttttgagcacggctattttagaactatccattctctcatttccatggatttgatataaggaggagactgtagcccaggaacaaaaatgactggggggaaggacatagtctttgatggctggtacatcagcatctctctcaggacctcctgtgtggcatgcaattgctgacttcatctcttgcaggtgcatttgtggtttcctcagagattctccatctgggggccccctaccacagtcctctgatgtaggccactgtcctcattgctgaccactcctgaccgcccacctgctttggtcctctcctctgcttggagctcacagccgactcctttctgtgacatctgcatctaaccccccaggaaactgtagtgtggtccccactgggtgtggacatgcaacctgccctaatgcaacctcctccccaattctgtcttctggggactactccagccagctttgggtctttagatctttccacaagagagccagtcatcatcccccatatatccaaaagtctaggggatacatttcagatcatgaagccccttccctcgctttagagtgggtgaagtaccctctacctccgtcatgggaagggtggggaaggggaccactccagtccactggcagctctccaagcgaaatcttctatgatctctccctcattaatctttaacttctctggtttactcttgcagtaggtgatgagctgatggttgaaaagtgggtttcacaagctttcagcatgacctgcccaacagactggcacctattgtaatgtgtttggtttggagacaccaatctgagacagaaagagtcctattttaatatcctatttccttggagtccataattgtgcattgtcttcagaacacacctcatgacatatgcattaattggtccatgtttttgtttttgtttttttcagggagcaagagggcctaatggctcagttggtgaaaaggtaaaaaaaaaaaaaaaaaaaaaaaaaaaagaactttcttctccctcctcccctttctttgagtttactataattggactgctgggctggaatattgaacatataaatgtcatggaacagagaggaacacatctcaaaggaattgctcagagaaggcagaacagctggggatggtggggagtaaacacacttcaatgttttctccttcctcacccctccctccaaatgcattcaaatgagtgcatcagcttatctccaggtgaactgtcaattagcaagacagctgtttctgtaccattaagtggtaccgatcagagaattcatcaacctaattaacttcaaggagtgattttctgattcaggcatgcatgttgttccttccatgagtgaacccagggctagataatcagcctgccctctttcctacagggtgaccctggcaacagaggcttacctggacccccggggaaaaagggacaagctggccctcctggggtcatgggacccccagggcctcctggaccccctgggcccccaggccctggatgcacaatgggacttggattcgaggtacttttccccttttctgtggttataaaaatgatgtgtactaagggctactagaaagaccagctagctaaaccctggtctcagggcagaggctgtgcggattcccctgtgagccgccagcttccaacaccacacctggcacaagtaggtgcccaggaactggatctgaaattctcattcttgctccttccccaggataccgaaggctctggaagcacccagctattgaatgaacccaaactctccagaccaacggctgcaattgtaggtcgcctctgaaaccttcattatgagggttgtcacactgtcacactacagtgaggaagctgtgggctgcatcccggctctgccactttcaataactcaccttctctgtgcctccagcccccaactgtgcaatagggaaatgagatgctctttacagcttgtgtctttgaggaacagcatagaagttttgcagaaaacatgatgtgggaagagaacttgaaaatcatttttatctctcttcatctatttctctctctccctctgcctcttctgtctcttaccactaagcatctctactttatttcctccctccagttgccccattcaatgcacacactttgccccaggtcaaagccctgtgctcctggcaggtgcccctccctactgcctccagcccctggcaggtgttgtccatctcctgccatgaagcgatgccggctctcaggaggaccgatcccctggatttcattctctttgttaaatgggccccagagctgagcccttcagtctagcacagattcagggtcaagaggaccctcacccaatgctgggagagggccgctgattctctcactctgtggagtgttgcttccttctgactccagaaggggcatttttcgcttattcttggttcccattgcctgggacaaaataagcataaaagcttagggggagatggtgagacaagaggctagatggaggtgagcaaagtgactagaagaatatttatttttgtttatttttccagggtctcaaaggagagaaaggagaccggggacccaaggtgaggtcacagagccaaggtgggggtgggagggctttccagcctggttctgggagcattatcgctgtacagtgaatttttttctcacttcttgctgctttgaccagggagaaagggggatggatggagccagtattgtgggaccccctgggccgagagggccacctgggcacatcaaggtcttgtctaatgtgagtatcattcaggtcagagcttgtctacatattttccacctttgccaaagggaggagaaggttgtccatgacttcaaagcttctggctatgcaggaggcatgtagccagtgcctggtgttagaacttccacctgccagcacctacctgttcctcccccagttccactgttctctcacatggtgcttctagatttgtctcttctgattagcagcatttggggtcaattgaaaaaacaggctaggagcattagagatgttggggtcttgaggaagccccagataagcagtgcacactttccccagccaagtgcagagcacattgagaaataaagccaaagatgaggaggtaggcccagataccaccttgattactgatggaggttaggtggaaggccttcacccagtgggagagccacatgttcctgccaatcagacggacttgcccatgggttgccagatgtgcttcccagaggcaggcagatctgaaggaaagaagtgtggctgagctgggcatgccccttggtgcttcccaaactgcccatcaggaaggtccctccacctcaccacggagggggtacaggagccaagagaagccaaggattacacccttcatgtcacaggaaacatctttatgtgctccctttagatggctctttgatagtctattaaaactaaaactaaaaatacccattctccaaaatcccacatgggaagatgtccacacaaatggaggaaagcatcctcttcccaactctcctcaacaaggaaggcagtaacttcatccttcaaacccccatcatggtacagcaagtggcctatttacatgtctgactcctccacctgccctctggggctttttttcttctctgtatccccaccactggcctcatagtgctggtttaatcagtgtttgctgaatgaaatgtttggtgtcattgaattctctattcctatgataaatactctggcataagcactcatgggcatgcactctgcatcaggtccatgctaggctctgtgggtataaagataagtaaggccaggcacagtggctcacacctgtaatctcagcactttgagaggccgaggcaggaggactgcttgagcccaagagcttaagaccagcctgggcaacatagcaagaccctgtctctgatattaaaaaagtttctattttaaaaaattaaaaataaagataagtaagacagagttcctgtcttcaaggagcctccagtgaggtcaggagaagggctgtaacagagctgtaactgacaggcaaatgaacataaagaggggaacaagggagaaaagactgtttgggttatgaggaatcaaggaagacttcctagaggaagtatctttgagcagggattggaaagctgagaaggattttaccaggtaggcacggaggacagaacttccaaagctctagtgtcagggatgccctgagccaaagcagagggtaggacaatgtggtgtgctccaggtcgagggagctgactggcagaggatagtgcacatgggtgtgtgtagagaatgatggaaattggagagaaggctggaatgtgggctgggaccagatcgcatgcatttaatattaagacatcacatcatgaaaaatcctggccctttagagagaaataacatcatgctggtagaccacagaaagacaagccccaaataactggaaaaaggatgactaaagttagaagaaaaaaaaaacacgatttttaaaaatcaaatatgtgtaagggtgtggggaaaaaggtaatctcatgtgcttctggtggaagtgtaaattggcccctttggatggctctttggcagtcttttaaagctaaaaatattcatattccaaaattccacatggaaagatctccacacaatatggccgagtgaaaaaagcaagttgaggagtaatacagcctgatgccatttatgtaaaataaccacatggacaaacacacacaccccaacactgtgctttctgtgggtgcatataatatgtatatgtttaaactctaaaaagagaagacattcgtatattgtgtgatttaaaaattaagtaaaggaggaaagtgcgaaggcagctcagagctgttttataagaagggggagggagagctgtgtttggcagtgggctgagggcgttctcagtgtctgcggtgttccgctatgctgggtgactttaattaaagctttgctgccaggaacaaggcagaacacatgccatcctttgtcctcattgtctgatttttctcttttcagtccttgatcaatatcacccatggattcatgaatttctcggacattcctgagctggtggggcctccggttggtatctacagctgccccagaatgtggcttttacccagacgcccctgttgaaacaaagtcgggttactttggaatccttttagctcctgaagcgtagagctagaatatatcaaagtagaatggaaagaaagctttgcattttttgaaaagttgctttcacattaatttgatcatgtggaaagttgtctccaaagcagtggaagcttccagtcctgtgcaccggcaatatgtgtcatggaaattagagaatgctaagtaacaaacagatgacatctgttgcacacttttggcctgcttttatttacattatcttatttcatagtataggaagagcctggagacacctttccttgtgctcaagggaaacgaggaagaaatggactcattctagtctttatagccccattttagaactctggaaattatctgtgtgttaatttccagatctctaaaatgggattataatgtatataagaaatacacattatttttggccagaagtggtggctcacgcctgtaatcccaacactttgggaggctgaggcaggcagatcatgagatcaggagtttgagaccagcctggccaacatgttgaaaccctgtctctactaaaaatacaaaaattagctgggcatggtggcatgtgcctgtaatcctagctacttgggaggctgaggcacgagaatcacttgaacctgggaggcggaggttgcagtgagccaagatcgcactactgcaccccaggctgggtgacaaagtgagactctatctcaaaacaaacaaacaaaaaaaaccaaaatatacattatttctgcaagttggcagagttgactcatggcacaatggccctaagatgaaggaagcttcctcctacagcctgtagaataaatactcattgcatctcccagcatctgctggtcagcacaggagaaaggaaggagctctggccttaggagccttgaggttgcagccccatcttctccacacaccactctgagcccctaattctcttctctgatgacacctcaccagcctttgaggcaacttgtaagaagtgagggatgtgaaactgcttagcacactgtgacgctctgtgcaagtcattgtggagacaggtttatgccttcacagctgtgcaatgccgatgtccctgcctctcctgcagatccccatgaggttgccctgaatcccattcatccagatccaggggaaaatctagtgctgccccaagattcctgcaaatatctgcagactcttctggcaccaggtttctcccctgctgagtgacctcattgtgagccatcttcctgtctcctctgtactgcatccatttgatttctatgaaaaccaataatccaaaatacctcaataatgaaaccctagagcaaaccagctaacaagtgaaagtttcttcccaaggggtctttgttttccccaagctattggaggtttctgatattaggtgggtggatactgaagcaaaacacagagagactaaaaccagagattgggcatccctgtcctcacagtccctgggccttgtctgcctgcattaccatgcctccaccccttctctctcttccttgctttctttccagtcactgtcctccccttggcaaatccagaccctcacagggccccttcttccctaatgctgtgtcaatccgtcttcccagctgtgggaacatgctgaggcctttggaaggggctgggagggagggggtcctgctgactctggaaatgccgctcctaatccagcgtgctctatctttggtgtgtcacaggggccggacgggttgcctgggctgccaggatttccagtaagtaccaccctcgctgtcttctatctgtgccccgtggctgcgatcattctgttccttccacctagaatggcatttcctccatctatgcatgactgagctccaggggcatcttgttcattaactttttcttgatatttttgatagatatggggttttgccatgttgcccaggctggtctggaactcctgagctcaagaaatccatctgcgtcagcctcccaaagtgctgggattacaagcatgagcccctgagcctggctgattttctgaactttttacattttctaaaggcacatatcatatgataacactaaaaatagtgctaactagacgttaaaaaacaaaagagagaatggcaaccatgaccacgattgtgaccatgactctgaccatgattcttggttagcagaagaaaaggccaaacccctaagctccagccccggcttggctgctccaagacctggggcacatttcagagcacactttcctctaaatgagtggtcctgtgttcctgagggagtcccaggctctgcaggagagcctccaggacctccactgcagggagtaaggagggggccaaataggcacattccaggccactgaccttcaataagggaagcttcactggacatatttgtatatattaggctttcatttaagactttatttgggggaaaaaaaaggaaggaaaagagtttcactgctaaacaataataacaaatagttgaaagccactgctgtaatgggtaattcactctttcatccagacaagacaggaacttgtgaaaagttaaaatagcaataaagtgttgaaatgcctttttgaggcagatgtggctgtgtgagtcattgtcacaggcattcagtgtctgttggagttgagaagaggttgcctctggctgcatgtgtggatttggctctgcagaggggtgggtgggcattcctatggggggggtggcatgagtgctggtgcagaagcaatggaggagtgcagagaggctgcgggaagggagtcaacctgatggtgtgggagatgagatgttgatgcctggctgggatgggctggggtgccaggctaaggtacctgggtcccatctcataggtagtggggagccagagaaggggtgggagtcgtggaaggggatagtggaggaggcgggctgcagggtggcctggaggagccgtggggcaagcagatgcagcaggcccagataataggctggatcagtagtgcccagttggaggaaaccaatgttcaaaaaagtgtgaagcctcaaggcctcttaacactcagtgctatcttctttctgccagaccacagtttctggaccacttaaggttaagaaaatgtcataggtaatcatgacttccacctacctgggggatggcagtgtgtattctactgttgagaaaaaatatatttctgattggtttatgcattttaatcttaacgaacaaccaaatactatataacaattccttccagggtcctagaggaccaaaaggtgacactggtttacctggctttccaggactaaaaggagaacaggtaagaggggcccaggtatctgagtgagattgggcgctggaatttgctaaacgtttcagattggctgaaaatagctattaacttttctcttctttgagatacaattcacatgccataaaattcacccctttaaattgtacaattcagtgatttttggtgggctcataaggttgtacaacctcatgaaccactctgtaattctagaacattttcatcataccagaaagaaaccccatacttattagcggtcactctccagctgttaacttttttaatctccaggttctctatgagacgagaaggtacgaagtgggtagtgaaattgatttttaccataatttggaaagagaactcaactcaacactcctttgttctcacacacactgtgctttgtctaaccacctgctgggcatcccccttagaacatgcactgcctgaggacaggcatcctgccagcttcttttccatagctccaatactaatatggggcctggtatacaaatggtactgaatacacttgttggacgaaagcatgtataattaatgagtagaacaaatgttaatatttataaattataaattgagcattctgcagttgaacaacagtcttggtccaaagtctctggaataaatacttagcacacagaacacttcctgagaactcccagggtaccaaacctattgttgtgcttgtattcttttgtgtttgcctcttagaattaactttccagttggtttttatagataagggggagagtgacgtccataaacagattaatatattcactcgtccatgtatatactcatccatctttcgtccactgacccgtgtggtgtgccaggcagtttcctgtgctaggcgtagggatatagaaataagatgaggaagagatatgcaaagagctaacagagcacatgcttacagctggaatggagctctgtgcaaagccagtgggagcactgtgcaaccccctgagcctgccatggggagtcaaggagggtgggtgtgctctgtgggatgggggaactcctctcgttcttctctccccccatcattctataatataatggtctccaaggaggagagggcctccaatatctagtgggccactgctccagggcatggagggctcggtatgctgggtgaaggtttggcatcacgtggggatgtgtcttgggatgcttttcctgccacaggcctgtggagatggaccagggctggccagctcaggcttgggaggaggcccagggaagcaagagcacctcttgctttaaacactctgtttaaacactctgtttcctatgtggtaaggtcagatggatctagagggacggacatgacatccccgccctaacctcctgccaccttgaatgactggtccaggcagccgggcagttctgctctggccattgcagtgaacgtgctttctctcactctgcctctaatgcttttgtgcttgcttcttctccctgctggcgtgctcaggactacctttcctcatcagtggagtggtaagatctaaataccaggtgtgggcttagggggatggaagaaagaggctgctctgcttgctttgatgctactgtcctagctactcccagccccattgaaaagagacttctgtgtggctcagccctgctccccaggggccagcattgaagtttagggccaaagcctcagagtcagatagaaggtttctgcacccagtcttgttctcttgacaatcatcttctcagcagcctctagcatagtagatgtctctgctgaggacaggattggggtcaggatcctgtgttcttgccaccagtctacccatcactcattcctaatgtctgggatagctttgcctaactaagtaagtgtttgcacaggagcttagagtttggaggcaacgttgcatatggagacataaggcctccatgttgacagaggcctctagtttttataccgtcatctctttcctaatttcaggtgttttaacaagaataagtattcttggtgggaacagatctcaggttgagttgctaggaaagcaagctgtcaaatacattgggagccagagcttccttgagggcaccatgtggcaggagatagacaggaccacactggggctggatcctggagggttgagagtgaggatgcaaatctgttatcagtgggagcctgaaggggcatggaagacaggactgtcctgtgccttaggacggtaactctgatggtgcatagagggaatggctgagagaacattcattcatttaggaggctgttgcaatactctagtacgaggtaattttggagcagtggggtttcaagtaggatgaaggcaagagaaataaatcatggctgcaggactcagaggtctctgtacaaggtggcaaggaggagtctctgtacaaaactctctggacaaggtggcaaggaggagtcctgacttcattgagatgttctctgaattgcagggcgagaagggagagccgggtgccatcctgacagaggacattcctctggaaaggctgatggggaaaaaggtaattatgtcaccagaccctgcaggcacatatctgccccagctttgcatctttgtttctgtcccaaacagtgacaagtatatatcttcctgttttagggtgaacctggaatgcatggagccccaggaccaatggtaagtcagagcgtctctcagctggatctgggctggggtttgaagcatttttcatactttgatttggttagatttagttgtcccggttatgaaaattcaaagatgtggcaaagatgtgcaaaatgtgcatatactagggtaaggctgactacaattaaataaacttttcagtgatttaacacaatagcagcttatttctcgctcttgcaaattccactgtggttgttctcagcttggcatctctcctccaagaagtgactcagggatccaggatgcttccattctgtgattctgccatcttgtggattcaaggtcgcacaggagctagcaggctgaagttggggagggggaagagattgtgaaagataataaacatcacttctggcacattctgtaagccaaaacccagacgcttgtggcctcaaaatgtagtttagctgtgtgtccaggaaggagaggtgcacttgcagttataccacagaacttgccagctaaagatgaccaatttcccaggaaaccctcaaaggaaccccacaaaacctctctgggatttttgattctggttgtgaatatgccactcatttgctgtgagaccttgtgcaagccctcttctctctctgggctcctgttttcccatctgcacattgaagagactgaattagtactaaatgatattagggcccttctggccttacggctctgggaatccataacccatctgggcttctgagcagctcttgccatttctctcaagggcgaaccctaaacttacttccctgtgtagaacattctctatgggtcagactgtactgatgcttcacataggtcatctcatttcatcttcacaaccccaagaagtgactctcagaatccccattttatagatgaggaaactaaggcccaaggaggttaagtaacctgcccatgtgacacagcttgtaagtggcagagtggggatttgaggccagccagtcaggctttaggtccagtctcttctcagatgaacctcactgcctctaatgaacatttgaaacattgaacatttgaaacattttgggctagagaattgtatacaggtttgtttggttgaagttggatctcaggtgtggggagaaaggacctcacatttctgtaacagacttgtatccttgaagaatggcctgtaactttcgaggtgaatccttcaaaagaccttctgaggcctttggtccctgaagttaagaagagtggacacccaaagtcaggtagctaagacagactgagagattcttgtattaactactggttaaccacctactaacctccaatactgtggaaaatacaaatagttagtggtgggggtcagcaggctgctgcagatgccatggcggtggttcctactgaagcccagcttggacacagcttgccaaacacaggcagtaagtggcaccttcttctaatttgcatgaaggtgctgtgtgggctagctgtggccctagtgaccagtgtagcttataacgccttctcaaattcactggtgtcctgttacacaaagtgtagaccatgcaccagcatcactgacatcacttgggagcttcttagaactgtagaacctcaggccccacccaagacatactggatctgcatttttaacaagatccaggtgattcttaacacacattgatgtttgggaagtgtattagtccattctcacgctgctatgaagaaataccaagactagataatttacaaagaaaagaggtttaattgactcctagttccgcatggctaggaggccttaggaaacttacaattgtggtgggaggcatctcatcacagggcagcaggagagagaataagtgccagcaggggaaatgccagacacttacaaaaccatcagagctagggagaactcattcactgttatgagaacagcatggggaaatctgcctccatgattcgattacctcccaccacgtccctcccatgacatgcgggggttgtggaattacaattcaagaagagatttgggtgggcacacaaagccaaaccatatcaggaagtgttgcactagaacataccaaccaagtggcctgtgccctgtcaaccccatctgtctttgcttttctttccctaagagtaatacagactgggtactttacgtactgaccctgtttcaactcagtttttgtttgtcatttttcagagcatggctatgtatgtttatggtaggatgaaaagggacttggagtgccccaggcttaaatcagtcattcttctgggagacacagcagacccagctacagggttggaaaggcgcagactgagggtagaatttgttctaggaagacatacatcatcagtggtgttgtctgtcaaccaagtagtttacatcccagacattagaaggcaggagggttcctgaaggttgcaacagaacagtggttctagaagcctgtggtcctggaaagccagcactgaaatagggtccatggtctggaactcagctggatgactggggtgtcagaccaagactctggttcctaggggcaggttagagcaaggaaggaaccaaatcctagagtgggttatcaggccaggctggcctgaggggcgaggcagggctgcgttattcagaatgggggatgcgataagccctgggacataagacctagggcagaggtccatgttctgggctggcccagcacctggctaccagggagctgaggccctgagctactgacctcttgctccttagttaaccctgactgcgaggggctgggtccagagtctggggtgggttggagcctgcaggaaagcaggggatggtgtgggttgagcaggtgcttctagctgagagcggagaggctggagacaaggaggccgcaggcaggggcttctacctggctccctgccctccttcctcctgtcagtggatcatcgtcaccactgcctgcaaaagcgggcttgcactcctcatttccctgaaccaagactttctgttcttttctaatctggcatttgttttgcctctaggggcccaaaggaccaccaggacataaaggagaatttggccttcccgggcgacctgtaggtatcagtgttcattggacaggctggagggggaggacacgtgggccaggctggtctgtgggcggagggtttactgaggtgtctgctgtgggttccagggtcgcccaggactgaatggcctcaagggtaccaaaggagatccaggggtcattatgcaggtgagtcaccctggggatggagccggaggttggtgtccagagagggtgagagagtgtggggtccacagagcagggcctgtggactgaatgttcaggaatgttgttcttcttccttcactgccactgccaaaggtcctcccacccagccctgtccttcagctccctctcaggagggtcctgccacctaaaacaccttagtggaaaatagactttcttgtgtaggacccagagggagtaggggagaaagggatctggtcatgctcagaaaatgtggttccaaatcccagggcctctaactctagggtaatgtcacctctcccctcctttacacagtcccagggatcactcacatcactaggggctcagtgagtgctggaagtcagtatcaaaggcagatcagctacttaggtggggcctcccaggttggcaaacactgggcagcagcagggaccctggtctagaagaaaaaagccaatgtttattcagcagctgctgtgtaccagacactgtgcaaagtgattttgttttgttttgttttgttttgttttattattattatactttaagttctagggtacatgtgcacaacatgcaggtttgttacatatgtatacatgtgccattttggtgtgctgcacccattaactcgtcatttagcattaggtatatcttctaatgctatccctcccccctccccccaccccacaacagtccccggagtgtgatgtttcccttcctgtgtccatgtgttttaaggagagtttctcatttagtcttggtgataactattgcatgagatactatgcagggatcttgttttacataagaggataccagggcctctagaagtcaaggcacccacccaaggtgacccagctaataatccccaaaccaagatgtaaacacagctctaagtctattgctgcttctgtttgtgccacactgcttttgctttgtatgcccagaaatccagaaatactattttcctgaagcattaggggttgagtctcactcaccaagcccactggaaccggcaggcaaaccagacactgacgccttcatttagagtgatcaatacactttctgcatgaactaaactcttcatgcctgccctcagagcctcacctctcctgctgcaagctcctgcctctaggcttagaggagaaactgttgcatggtactaaggccaagctggcttcactttgaaaatgactgtgctatctaacaagagttttgcatttatgcttgcatttctgagacacatttcctctggcaatatatcacatgagggacccccacagtccattcccacccgtatactgggaatgcactgataggggagccttaggctcagtatcaactgggtgtcagaatctgagttgcaatctcagttctgctgtaagttgctgtgtggtcttgagcaggtcacctcccctctctgggcctcattagctgcatgtgttaaccagagacaatacttgttgccctgccatcttccctatggtttgttgtgaagatacagtgaggccagggacatagaagtgctctgtggctccctgagcaacctgagagagaagttggttggcttcagcagaccctcctttccttcctctggaggaagtgtcctgtggctgcccctgcattcacaacaacctgaactaatggaatggcctttttttcttccttcagggcccacctggcttacctggccctccaggcccccctgggccacctggagctgtgattaacatcaaaggagtaagttggcacgcagtgggaagaccttcccgattggcctaagctggagtcaggtgtcctgttgacctcacctctcttgttctcattacccacaggccattttcccaatacccgtccgaccacactgcaaaatgccagtaagtagcaatcactgccttaaagagcaggctttggcatggatagcaacttggagaaaaagatcagtctttgtcttgggccctttctatcctcaaatgtcctctctgatgtcttctgtcccctaagtgtagaccctcaagtgactagaagcttttagataacaggtcgtggcaatgaaatatactggatcttctaagggtgcacacacggtgaggtgcttcttttcatacaatctaaaaagcagtgtcttttgttattgcgaccacattagcttcatgcttggagtagtataaaactgggaaaaatagacccgttagaaaacatagattagaaaacaatccatgccaacccatgatctttgcattgagaactttgtaactaactatgctgccctttcccagtgatcacatcactgcaccgcacacaacactgacaggcagggctgatctctcccattttatgataatgaaacaaactgtgactcagagaagctcactggcttgtccaaggtcatgggacttgactgagctgggatcataactcaggtctcctaaccaccaggcagcaggtgcagacactgggatgctgaggggtcaggcacttgcccggccccccagccattgagcagctctgtccctgattttttacccacaggaagagagtcagatttctgtgagaaaacccagtggggagggtgggccttgtgtacaggccttagtcacagaaccatgcataatcattctctcattcattcgacaaatatttattgagcacttatgcagtgctaaggactctgccaggccctggggacacaacggtgaactagacggatgtggcctctgctctcaggagcttgcaaattacaatttagaaatattctttgaggtgagttcgtaattgatccctgttggaggtgatgttaaggcttgggtcatagccttcaaaatgacgcagtttggccgcgtatttgcccagacatctggctaagtctaaacgttgaggcatccaagtctgcagctcagggcctgggaactctggcctagagggcaggacccacctatgtcaggtgactaacgggctccaggctctacatggagacaacagcaacccagtatgtgtttatatccatggcctgaagagaaacataaaatctcagtgctggagtgaccttcctgggcagtcgctgcatcccacctgcttatcacacaggagagaccacacagcccagagaagcaaaaggctggctccaggtcacacagtgagtcagtacagcagcctctcctaactaacatgatttcaggcctcaaatgagccagccacagaacagcacttgacaaattttagagtgcggtaaaaatgctactgcaattatcatgacctgcaccaggacctctcacagtaaccatggcctttgggggtcgtggggatacctaaaagaaggaaaagataggctcaaagcatttttagtaagattttttacttcatattgcctggctagatactgtaggagctgggtcatagacgtttcttgtccaactctcaaaatggacattttgaaacagaaatgcttcctcttacagccagcatctcatgagccccttctagtttcagctccttccaacaccctaatcatttacagctcatgtctgtagtggagaaactttatcagcatagcctgcaagataacagcttggagctgcaactttcatccttaacttagaaatgtttttcctggtagatttcctccccactcccatcttttcttgatggcccctgagcagcttgtgaccctccacccgtaagcacagaaggattttggcaccatacggatgactttgattctacacatcaattgggaagaagccaggtttcaagtggctttgtctgaatagagaaggaaatgcaggaatctggggaaaactgggaaggaatattatccagaacagcctggactccagacccctgaaacttaatgaggtgtccagaatagcacccccaatctaatgataaccccctttgctaattacctgcccatgatgctcatctttgattacatgcaatagctaagctaatggctgacccggtttcacggttgggcatgtcacttgctcggatgcttgaccttacacatgaatcaatcccaactgataagaaaggaagacaagaatgttcacagttggccaaaccaccactgccacgatttgttgtcttaaagctttgggcttccttatggctgagttttttggccattaggcctcagctctgtctccccagctcaactacatcatgggtctcccagtttaaagcctgggatgtctgtgcattgacaactcctggggactcagggctttgggggactccagagccaaaggaaggcctgactctgtggcattgcctcttttgtcacatgcccccgggacagtggctgcctgtttctgcaaacaccacggcagagcttgcagtgcctaacctggccttcctctctttccaggttgatactgctcatcctgggagtccagagctcatcacttttcacggtatacactcccttcttcatcatttgtttctctgggacatctccttgaggaagatggttttcctttgcccagtgcagggcgcagactaggtggtcaggaaggtctaactggatgctgtaggggtggggatggcagctgagccaaggctgtggggctgtgcacctctctttggtttggtcacacatgtgcctattctgctcatcttagctgagcctcctagttggcaacaagcactctgttctttcaattgttcatttgttcataaaacattcactgatgcctattccttacttggtatgatctgcactgggctgaggcagattccaagagcctgagaagcgctgttcctgcctctcaggctcttggaacctgttaagtgaaactactttaaaaacaattatagtgcattatactaagagctgatcagggaagggccgtgggagctcaggagacccttgcctcggtgtccatgcaactttgtaagcatctcctgggagcttgttagaaatgcagaacttcaggccccaccctagacctgctgaatcagaacccgtgttttaaccatctcccgggtgaggtgagtgcacagcaaagtgtgagaaatgctggctcagagggtttgagtagtaaatgtcagcatattcatagccacatgcaggagctttgctatggcacatcagaaaggcacaggccaggggatggggcctgcaggtgagcagtcactctggtccccctgtcctcacacaccctgtcacgccacttggggtttaaatagaggaaggtctttttcctccaatattcactttcagcttggctgtgtcaccccggcccacgaggtggtggtctccctgatgatatctagccctgtggtttttctgtcacttctgcttaccaagcccagcctgtttgcaaactctatgcttagattcagttcaaggctcccctttcccctgatgcaaggtggaccttggggagcaggggatggagctggatttgttttctcagattccccaattgttcctcttccctgtgagcctcccctggaaggagggggagggaacagatctttctggatgtgacagctcctagtgagcaatcatcctgcttactgtgtgcagctactactgctccggttggtgctggtgcacttgctgtcttctcttctgatcactgctgtctgtgggctcagtgtgggtgaaggaggccccatgggccccactgcgcaggtcattggtctcacacagcattcccagggttggagaggcctcgacagatgtagttgccgctccctactgaccccctgttgacaccatcattcctgtgatgctcatattccctccccttcattgagaaagcctgagtcgctagcctcatctacactttgtggccccatctctaggctcaagaccattggtgggttgatctgtcacacctcttgggaacgaggaattcaaagacctagcgtccaccctacccatcaaggtggggaaagggaaccacttcccttcccaagcagtgatctcccaaaaggctttcctccatgccccctcccatataaagagttgaggggaaaggtggggatggaatgccagttctgcagaaacagtgtttctcactagtcctgtggggatgtacaacacttcatggtgggcattctcacaactttgtacgtagaaaacttagcgcccttggttgtcctgtgcgggcactcttgggagagccctcctgttcccttacaaccccatgctacacaggcctagatgagatgagtctggaagattgacatggtgctgagtctctgtcttcatttgtggcactgaccaagccagggttagccgcagcctctgctgcactcacgggatgcgctgctggaacctcagtgagagcacatatttcatcttgccttgcgttactgtgagctctgtctgtctcccagtagactgagcttttcaaggttgagaatgtgtctgaagcatctacctctgccctctttatgattttacacttgctgatctctcaggagggctttgtttgagtggactttgctaaatgagcttagtttgaaaacctgtctcagaaaggttttatatagaaagaaggtgattttccatttttttttaacatgtatgtgtttggtggcaggtgttaaaggagagaaaggatcctggggtcttcctggctcaaagggagaaaaaggcgaccagggagcccagggaccaccaggtattccagctcttgttctcaatcttgcctttgattttttgctcctgagaacaaatgcgactgagaaatgtgacctagccagagggtaagactaatgacattccaccctgaccacaggctccactggtttctagtgaaaaccaagcatgggcctggcatgtccaatagggaacattgtcaagagagaccagaaaatccaatcattcatcttttatatgcaaaacaatgtccaaagaaggccagggacctacctgggatcccacagtgtctgggttgatgggcccacagtagctagcacctgtttctgcttccaagcagactctgttagccaacccagtgcaggctcacatccactaagatgtaactgtggttgccaacttagagacttttattttaaaatttctgaaattacaatcgtgaattttacgaagcatttctttttcaggtcctccacttgatctagcttacctgagacactttctgaacaacttgaaggtgagtatttctctaccaatatttggcctgtgtttttcaggttttggtttatgtcagagactgagttcatcccactcttactgaaatattcctgtgttctctgcttccagggggagaatggagacaaggggttcaaaggtgaaaaaggagaaaaaggagacattaatggcagcttccttatgtctgggcctccaggcctgcccggaaatccaggcccggctgtgagtagagacccctccaagtcatctaccccaaagacttacagctttcccggaagcccccaatgggactaggcagttagggctagtcattgtactataagctggaggcagagcttggggattagccagctctttccccatccttgttgattgatgggcaggttggctgaggtccctggagagaaggtagctggtcaaggccacatgaaggtaggtaacttccaggccattagtcacactgccttattcatgacattggtggaaaattcactccacacaaagaatgattaatggtgaatgcatcagataacagaagcagaatggaaggtaaggagatatttttagaggagctgtttgattcttctgaaattttatcaaaggagctcctagataggtgtggttttcctaggatgagagatttttccaggtgaaaggagagaaagtcaagctgtgcccccaacaagaatatgactagatcattgacctttggtcccagagctcactgtgagggtagaaccagcaaagccagagatcagagttctgcctctagctctgcatctaatttgcttcatgatcttgggcaagtcctttcacttctctgggcttcagtgtctccatctgtgaaatgcaaaggctagactagatgatctccaaggtcccttctgcctccaggagtctctggggttctctgtagaatcattcaacataatgactgggctgccatcttggaggccttaccccaccttgaattgtgcccaagattgaggatagtaataacaatagctggtgtttattgatttcttttaaatattctcataaaaggactagatgggacttcgagtgatgaatgatgctttctctctgttattgtgtgcttgccttgacagggccaaaaaggggagacagtcgttgggccccaaggacccccaggtgctcctggtctgcctgggccacctggctttggaagacctggtgatcctgggccaccggggcccccggggccaccaggacctccagctatcctgggagcaggttagtgccgtaaacagtgcccttgttcatgctgtccctaccattgtgttcaaggtcacagcatctgggtggcttgtcacagctgcactgcctaacagagggctttcctggataccgccttctttcttttttttttaattgagatacaatttgcacatcataaaattcacccacctaaagtgtctaatccagtagtttttaatatattcatgaagttatgcagtcatcaccactgtctaattctagaccattttcatcacaccaaaaagaaatttcataccaattagcagttgttctcttttctctctttccctctcctccaccagatctgggcaaccatgaatctacttctgtctccagatttgcctattctggacatttcatataaatggaatcatataatatatggccctttgagtctggcttctttcacttaacacagtgttttcaaggttcacccatgttgcagcacggagttcattccttactgtggccaaataatattgcattgtataggatatacattttgtttattcattaatctgttcatggacatttgggttgtttctactttttggctattatgaataatgctactatgaactttcgtgtacaagtttttatgtgaacatgttttccgttctcttcagtatatacgtaggagaaattgctgggtcatatggtaactctatgtttaactttttgaggaactgccagactgttttccgaaggagtcacaacatttctcattcccatcagcagtggcagtgtatgagggggttccaatttctcctcccatattatggtatcctcattgtatctttttgattatagccatcctacttggtatgaagtgatatctcactgtggttttggtttgcatttccctaatgactaatgatgttgagcatcttttcacatgtgagtggaaacttcctggctgctttgtcaatgccttaggggcgtgagaacctgtcttaatgaccagcagtgactggaactctgtatataaaaatctattcatcctttagagcctcacctcctcatatgcaaaactggcaaaattaaagaaaatctctatgtaatgagcatgtatcagatgccaggcattttgctaatcactttgctatggtattttattgaaacctcacaacaacactttaaaaaaagcattaacatccccattgtacaggtaaggaaagtgaggcccagagacatttaggaacctttccaaggtcacacagctaataagtgacaccaacaggattcagacccagagcagtgtagctccaaagcctgtgttatttctactatgtccattggaggagacaataatagcagcaataatagcatgaaggcatacttttttgttgtttggcttggcaggagccaggtatggtggaagcatacctggaaagagacctacagagtccttggcataaggagagctttacacaggaggtgactttggggctggggctttgacttagccttggatcttttggctgcaagtgatagaaacgtaactcaaagtagctcaagcaaaggggaaatgtactgggtgtgaaggagggagtgaacagtcaacttgtgggagaggtagataaacagctggacctcaggaacagccagagccagggactcaacccctgcaaggattctctggccatctcttgtctcggcttctctctgcatgcagtttcacgcttcctcaccacaaaccacatcctctgcacagcgggaaatatggttactgacaacttacagcttccactgtcagctagaaatcttgaacttcttttactattttagtttgaaaagtcctgggatggggaagtcctagagaagggtcctgatgggcctgacttgggtgaggtacccaatcttggacaaatcacctatgaccaggaggtcggatcacatgagaacatggtagctctttctggaaccaaatggttgtagaggtgaagggaaggtcccaagagaaggagatgaggacactggtcctacaaaggaagaaggtgccgagtgtatggaaccacaggtgcccacacagccatgagggaggagtaggactacaggaggtggaggcatattacagggtgagtgcaaggtggagaaaaactgttgtccacagcaacactacattagggctgccgggatgccttgctgcattgagcaaggattgcttctcacataatgtatagcaattcagtttacaaaacactttcatggccattatcccatgtagtcttcacagcaaccctgggaggaagataaaacagatattattataaaattcatctcacggatgaagacactgaagctcacagaggtgaagagacttacttgaggtcacaaattctattaggaggcatggctgggatccaaatccgagtccactggccctctatccactagacatttgccacctgtgtgtgggtgttcaagtcctatgttggaactgaacatttgcttgcaacgacctgaaggactgtataattttactggggcttgtaaaaacacccttaattctgccaagagcttggcagatttggaggagttgtcgggggtagggtgagcagaggatgagagaggtagaagaacagccaaaggaatagttgtaattatactactttatgtttgcctaaagtaagggcttttcagttgaggaatcatagactcctagagagttcaaggatatacctccaggatttgtcatcccagtaatatttttttatagaattatgtgtgcatttctctgggaaagagggcactaaccttgatctgatttttaagggcactgtgactcttcaaaagctaagagctcctggccggatgaatgctgtacatgtacaattttcaaagcactcagttctcaccgcagcccagggaagaagaaatgcctattttacattttgcagatgaggaaacagctttggagagcttgctgtttcctcgagatcacacagctaggaatggacaaacttaaggacttgagtccatgtctctggccccaaggccagggctactgtcactgcaccaccctggtctcctcccactccctagagccttctcttcctctttctgagcctgcttcctctgttcagtgtcacatgcttgtctcttgggtgaaataagttatatgagtcaggacatttttgaatgcaagtgacaaaatattcaacttaagctggcttttataaaacaaccacaaaaggaattgattcacttatgaaacggaaaagcactagccatggcttcatccagggtaacaatcaagaatcccagctcttccctgaaccagtcaatgtggcctaagtcacacgctgggggcacagcacccaagatacaggtggaagttgggatgctttgtggcgctgtgaatggggttgaacacacttctctccgggagtcagctgatacctcagacatttttcagagtgtggtttttgtgtaacttctcttttctgttttgtcttagctgtggcccttccaggtccccctggccctccaggacagccagggcttcccggatccagaaacctggtcagtattatcatcagtgtgtagtcatcattccatttgggatagatatacttaaaactctgcctacgatctcctgtgtctgacatcccttggggatcaggccttcatgatagtaggcttggtgcaattccataaatagtagaagggatttgttatctatttggatgacttattaagtaaaaagacgtgaaaaaacaaaatcatgtatatgtaagttccaccattcgaatccttaattgactaagttataacaagaaccaatcatattacttatatatttttatatatatatatatatatatattttttttttgctggatgaggggtggacggggtctcactctgtcacccaaactggagtacagtggtgagatcacggctcactgcagcctcaacctccctgagctcaggtaatcctctcatctcagcctccagagtagctgggactacagatgcacactaccacacctggctaatttttttttttttttttttgtagagacagggtttttgttacattgcccaggctggccttgaactcatgggccaccaaggtgattctcccaccttggcctcccaaagtgctgggagtacagacacgagccaccacgcctggccaccaataatagtatttcaaaaagcataaacctgctcgggtgcggtggctcactcctgtaatcccagcactttgagaggctgaagcaggagaatcacttgagtctaggagttcaagactagcctgggcaacatagtgagatcctgcctctacagaaaaatgtaaaaattaactgggtgtggtggtgcatatctgtagtcccagctacttgagaagctaaggatcacttgagcctgggaagtcgaggctccagtgaaccatgactgtgccactgcactccagcctgggtgaaaaagcaataccccatctctagaaaaaaaagaaaaaacaaaacaacaaaagcccaagagcataaacaatgttacaacaggtccttgtgctggtcagatttacttggataattcagtcttctccattctgccaaagaacatctctggcacattcgttaccctgcagttcgttggaacaagacatagcactccaagattactgtaatgcacagaaaaatggacaaatacttcacaaggatgtcaggagtccaaaaatgctctttgatctttgctggatgttagttgcaaaatttggctgccaaaagaaagaactgtcctacatatgatggaattctgatatttggttcccttggggatatctaagtcattttgatgcacaaagccattatcttcaaggctaggtgaaaattaatattttataatctttctcagttacaatgaaaaataaaaactctcttggccgttatttctttgagatttgatgctattcaatagatttttgtagcttctgtatgtgcttctagatatgccaaatggctgtctaatctttggcacttttctaggcagagaaattacagacctccattttctatcatgcatttaatgtaactaccaagctagacaaaaaagatttaagaccttaagtatagttgctcacttgcttgcctttcttattccaaatgaaaaatttgaaactcttcaaggaccagcatgaagtaacaccatttaaccatgttagtgccaccaagtagcttaaaaaaatagaagtggtaaaacttaccagtgcttttgctaatacccaaaccaaaacaaagataactccattgacaatttgtaaatgtctttatactcacataatattgtcatttttgttttaattcatttattataagttagatttgtgtttcaaagtatacatgtttttgttttatcaagaagaatgccctttagttactaatgaaggtatatacctctatctggcacattaacaagcctctttattgagtatctggggacggctcctagttgactttacagagaggccaggttatcagatggtgccattcctctaatgataatggcagtgtttggaatttaaatgatctgacaggtcacagcattcagcaacatggatgacatgctgcagaaagcgcatttggttatagaaggaacattcatctacctgagggacagcactgagtttttcattcgtgttagagatggctggaaaaaattacaggtaatttctaaacttcctttaacacactgccttcaaataccctctaaaaataataatctactcccataaatgccatttttttctgttttgaaatgggagaagtttgtaattgatctttcatttcaatgtactgtttttcttaaagctgggagaactgatccccattcctgccgacagccctccaccccctgcgctttccagcaacgtgagtagttaccctgttggactgctcatgcattcatttatcagcatttcctgagtcctccttggtatctagcaccaagctctccaaactctggacagtcagctgtgcacggtttagtatctggtgaaatcctagaaattaatgggtgctaacaggaggttcccacagtagagcggaggaataactagatccagaggctggagacctgctgttcccatgtagtagccaaatcttcttgggcagagggcttcctctatcttggcctcagtttgttcatctgtggaatcattggttggtataagcaatctagaagattcctttaatttttggcaccatctgcctcataagaacatgggcaactggcattgtccatcttctagccctagagcaatgctttgaggtgggtactatcatccccgttttgcagattatgaaactgaggctctgaagaggtagctttctctattaagtgaaagagttggtgattaaacatgggtttatcaaaaagaatgcccttccttgattcagtgctctttttaaaactcttgagaacattttctccctttctgaagatgatttcttcagcaggtcatgaaactctttacagttaagagtcacagttacagacaatggcaaattatttaaagcatcttctcaagaaacattgcacttgcacctcaatacactctgaagaacagattgaatgcatattcagaactgtttcttttcctccttttcataacagccacatcagcttctgcctccaccaaaccctatttcaagtgccaattatgagaagcctgctgtaagtacaatttatacatttaatcttcaaatactgagtgtatatctgctaagtgctaggtctcatgcttagtacacagttcctaccatcatgatacttatagactagtgagagaggcaaacaaaaaacagagaattacaatacagtgtggtaagttgtttgggtgaaccaagcacagggtgctgggggtataagggagggcagagacgtctacctggaggaggttacctccaaactaagacccaaaggacagctgagttcgggagtgagccaggtgggagagaggcaaagggaagatggaatagagggaggtaaggggaagggctgtgcattcctgtaattgctagtattaaattacaggcaaaagagtagagttcaaggcagaaaagggagacatttagtctgtggaagtcagcaaagcaagtgctaggtttcaagggtctgcaagccaagccaaaaagtttgaccattttctgtgggcaatggggagctacagaagggtttaaagcaggaaacaggtatgacaacactagtgtttcagaaattaccttggctacagtgtgcagattaatcagaagggacaggagcaggggtccaaaggccagttaggtgactcctgtgttatctgaactagaatcacagcagtgagcccatagactagtgggcaattggagagacatgaaggaagcagaagtgactaattgggtcattgattgaatatggcgcattaaagatgagaaaggtcaagaatgatgcccaggtttctgcttggatgattgagtggtgacagtttcctttccagggattgtttcattgctgggattagaaagtctctctattcctttgctagcttaagtaaagatctcgtttaaatcagcatagaaacctcatggaactccatcacaggaagaacagccaggcctgggactcttgtctctattagtctgctttgctctctctatagaccaccttctgaaagggtctttcttcctcccaacctcaccccaaaacacatatataggtgacatgagcttgcacacagctttgggtcaccctggcactgattcttgccctaagtctgtgtgatcttacagctgctgaccccagtactactgactcagttcagagtcttgggagagatagtttatatggtctgtcttgggtcaattgcccactcccagcccaatcaagagttaccaggagaatgagtttgaaggtctaaggccactccttatggcagggattgtgggggcattttctattgtgctgctattgaccaaggaggaactaatttggagcatggtgagtctgaggtgcctggaggaaacctgagtggagactaccaggaaggaataggttctgaaggtctgaaaccccacagtgggatcttggctgtagatgagccatgcaattactacggggctggttggattcccaaaagagaatctatacagtcagaagggattagactatgaggagcaaaactgaaaaggaactgatgggagaaatatgagaaagaaactgagaagccatagccagaaaggaagaaagcaagccaagcaaggtagtagccaacagtgtcaaaggctgccaggaaattcataagaagaaccaaaaggtgtccttcaaatttagaaactagagcaaagcatttagtagccaaaaagattctagttggttgaagagtcagtgggaagtgaaggaagagaaatgtgagtgtcagtaacccttcaaaaagccccaaagttagggcagtagctaaaggattttttaaatggtattttataaattcagaactaatacgtattcattgcagaaaatgtcaacaatgcatgaaaagaatggagaagaaaatagtaacacacctacaattttatcaaaactacaaccatccacaaaatagcaattttaacattttgagtgttataacattactgtcttcctaaaagtacaatataaaaatgttgtcattttataaaaatgttccagcaattagagaaatacaaacatgagaacacaaaaacccccaatctcgtcattcagaaacaaccgtaatttcagacatttctctgtgtctctctaaaggacagtagggcttggtgggattagaggtggcaaggaagccctgcagttgccccctgcctgtgcctttcttaggtggcccctggcattggggaagcctcattccatcaaggcctcgtgtgatgcactctgatgtagccccaaagcacactggttggaagatgatgagaccatagggcttcttccctcaggcaccagagtctccagatgcatgaggaagaagacggggggtgggggcagtatagtcagatggcaaggacatcaaagggtcagggtgtatatgtggaggtggaagtctggtggcctgcctgtgattgtggtgggtgggcagcatgctaaagctccctcttaccctaatggctgggaatgtagagcataaaatgctagccactgggaggcctgctggggaagccttggctcagtgcggggcaggaaggagatggggatggggtgtgatgctgcttgacctggacctccatctagtatggtggtcaagacagaaccaggatgaataaaaagagagagactggagcaggtggcagccttggggtctgtcctctgcaggaaggaaaggggtggtgaatggagaaaaatatccagagatgtgcaagggctgcttggggccagtctggacactcactgtagctcatggccagttgtggccaactggctggaagctggagaagcagaagaccaccatggtgatcctggtcactgggacacacagaggctttgttcaggtctgagaggcggggtagaaaccaggagagaaacactggccgcctcctgccccaccgcctgagcctcatttcatgtcctttggcttaagatatttaaaaatattttcctttttggtaacttggacccaggtcctgcaccagcctctcagctctaagttgatgagataaaagttacccccgagatgagattgatgggaggcagggagatgagtgttccttgattatggaatgcattccagagggtgtggcagaaaggctgagagagggcagtagtaggaggctgggttttgggagagaaagtgtggaagaaatagactacggattggtttttattttggctgctgaccaagatagcagggatgtgaagctggaattactataagacccctagttccagaagggtctatctcagcagtcttagtcataggtgccatacccttctttcgatggctttctcccagatccctcatgtgatcagccccaggcctatccaggagatggaagaaagggctgcaggcagatagctgggagaagctctgggatccagggccaaagccagcttaaaacccctgcacagacccagaggtctcaaacttatggcctgcaggtggattccgagattcagatccctgaagttctttatttggtccaagcaatattttgttctgtttttttttttttttttttttttttcacctaaggaagacatttctaccacttagagctgttcagagagctgaaacaggctgcttgggagaccatagctctccttccccggaaatggtcaggcagagactgtaattccaatgtcagggagggattgaataaaatgacctccaacgtgccttccagcctaagaagtctggaatctttgcaggaatgtgagatggttctgggggctggagtttgcctttgattctgactgctctcttttgtctcacatttttcagctgcatttggctgctctgaacatgccattttctggggacattcgagctgattttcagtgcttcaagcaggccagagctgcaggactgttgtccacctaccgagcattcttatcttcccatttgcaagatctgtccaccattgtgaggaaagcagagagatacagccttcccatagtgaacctcaaggtaaaaataaatatggttcccattgccttctgcatgcattggtcgctacagggcctggaggcagttttcattcctgacatcaacagaagactgttgacttaagcctgctctctcccttactggctatgtcactttgggtgggttctttgccttccctgaacctcagttttctttatgcttgtgtgacccttggagcatgcaggaggagagatagtgataacttctttcattgatacagggttttcttgtttgtttacaaagtacctcattatcttaatagggacttctaataaacatgagagttattcattttttagtttgtcagatgagaaaactgaggctcagaagaagaaaccagtttgcttaaaatcactgcaaactagggcactttgtcctgaaccctgttttggtgttctgtgcccatttaagcagatatttctctgccccatttgtgggtaagacagggccttgtaggatccctcgattattccatagaaatagcagactctttcaaggctatgcagagaaacctcgttgccactcacatacaccgtggagaagctctgggtcctgatgactgtttcttaaaggtacttcaagaccctttagtctctgcaaccccagtactccaatttaaaaccttgaggctagcaagttccatcctaaccccatacccagcactttccacctcctctcccagaattctgttccagcaccttcacccactgaaattatttttattcttggatctctctacaagggaccaggctgtttcaggaaaaggactaaaaagttcatctccatctcacccacagtgtagactggcacaaggcctgccacaaatttgaagcttagtatgtatgcataatattttcaaaataacaataataaaataaagacataaaacacaattttgattggaaggaggcttgtatacacttctaataagagaaattccctcaagaaataagacagtaaaagcaaaagcgttcatggatggattataaaatcaaaccacaaacatttcttgagttttcactctgtccaggctctaggattggggctggagactctaatgtgaggtggcatctgggccttgaagagcgagtaaaaatcggccaagtgtggtggtgcatgcctgtattcccagcactttgggaggccgaggtgggtggatcacctgaggtcaggagttcgagaccagcctgaccaacatgaagaaaccctgcctctactaaaaatacaaaattagccgggtatggtggtgcatgcctgtaatcccagctactcgggaggctgaggcaggagaatcacttgaacctgggaggtggaggttgcagtgagccaagatcccaccattgcactccagcctggctggatgacaaaagcgaaactgtgtcaaaaaaaaaaaaaaaaaaagagtaaaaatctaactcatttgtaggctgatggtataatgattctaatgtggtattttgtctctatagggccaagtactttttaataattgggactcaattttttctggccacggaggtcagttcaatatgcatattccaatatactcctttgatggtcgagacataatgacagatccttcttggtaagtgagggtggaagttctcagatatggtgtgatagatagttttagggggcatcctaacaatgggatgcctttatcagctgcttctctaggatattgccaacataaagccacagtgaggcaactgagggcctcagagaaagccttgtccttggagtcagaagacccaggtccagtaactcaatatggaatcctgggcaagacatttccattctctgagcctcagctgccttacctgtcaaatgggcaacataaccacatctatgtcatagaattgtgagaataaaatgaatatatgtgaaaacatatagcacgcagtgggcacataataagtggtaagcaatgcaactcctggggatcctgtaactctacactgtgatttgcactctaaatcttgaaaattatgtgagtttttcagaatagaacaactcagcaaacctctcctcactgcctactctatacgaggcctgaggccaggcctggaaggcacaataataaacccacacagctcctacttttacagggctcacagtctacagaggaaatagacacacactaactgtgactctagacagaatattgtaattgtaagtggagaaacaggtaccataggatatacaggatatgtttgttttcatttttacttaggggtgagaatcagagatggcttcctgcaagaggaagttgtttattggcctttgaaagatgagaaggagtcactggtctgaaaatgaaagagaagccctccagaccaagggaccccatgagcaaaggtttagattcacaaaagaagagggtgtgatttgaaaacaactgcaagctgggtgtggctgcaatctagtgtgttaagaaagctagcaagggcaatgaggatagagaagtgatttggcatcagggttaaggagtttaacttgattcattagacttatgccaatttgcttaccaaaaaataccacaaagaagtgtcattttgaaaaataacatgacaaaattactttataggccccagaaagtcatttggcatggctccagcccccatggcgtccgccttgtggataactactgtgaagcatggcgaaccgcggacacagcggtcacgggacttgcctccccgctgagcacggggaagattctggaccagaaagcatacagctgtgctaatcggctaattgtcctatgtatcgaaaacagtttcatgacagacgctaggaagtaatggccttctgatgattcttaaagagttttcaattttttcttatgtgaagagttgacactgaaatctaaaatgtttaattgttgtaaatattacagttttttttttttactacatattctttacaacagcaaccaaagaaaacatacctcaatacactcaaaactgaagacatagaggactcagatcaaagacaaaatctgatccatatattggtgctagattctgcaggaaaccccagcagtgtgaacgcatcccaacataggttaagagcaagttgaaaacaaaggccatggcattctgccactgcatccttcagacagttatatcctccttttaaaccattgttgttgagtgtaagatgtccttcatgttttcttataaagtcagtgtttagaaatgttaccctttctaagttatatacagatcaaatgcttttttctttcacgtacatccatcatttgcaactgctgttcgtacacagaaacaggactgctcaaatgatcctatttgtattttctgatgctatcagactctaatgtttttttccctaaaatattattgccatcatgctttaggaattttatatttttacacaatcatattttagtatggtgtctgtttatgtaactctgacttgctggaaaagttgaaactccaaataatctgaaactagaaaagaaatagcacataattactaccttccccttggcggctctcctccccaacccccaccccacaattttatgacttccatttggcaattgttgaattataactgcgactgaaacaaacaggttcatagagatgaattttctgagaaacatatatctacatgttgtataattggattttttttccatgtaagtgaacataaaaacatcttttccgggtgctttcttca

SEQ ID NO: 105 - DNA, 50136 bp, Homo sapiens
gttgtcgggtcttattggccgctgattagaccagccggggtccactagccctgggcttcagggaggctgctgcgtccagtgaacacttcagcacctgtagcacagaagggccaaggagctgcagtcctcgaccagcaggaggtttgctcctcagcccactcgctgcatccagatcagctcacccctctcccttccctgcccaccaggactctgatagcccctggcagccacagcccattttgccaagatgtctagagtagccaaatatcgccggcaggtgagtgaagaccccgacatcgacagcctgctggagaccctgtctcccgaggagatggaggagctggagaaggagctggacgtggtggacccagacgggagtgttcccgtggggctgcggcagagaaaccagacggagaaacagtccacgggtgtgtacaaccgggaggccatgctcaacttctgtgaaaaggagaccaagaaacttatgcagagggagatgtccatggatgtgagtgagcacagccctggaggggaggagggagacaggggagggctggagaccctggcttcatgattaggatgcttccttccttagaagaaacgttcttgttggcaaaggattttaatgcttcagaactgatgattatccactgaactagcggtgcgaatctcttactcctaatttctgttttataagcagaagtcggatatgttggaggaacacaacatcccacaaaatcaaatagagctactagtagaatgggagctggaaggtgtccttgaagagtccattgtcaagttgactccatcctggtcccacaatacctttgtttttctccacactcattccatcctattgtgaggaggggtaaaaagagagagtgatactttatgtctcctgtcagccacccaaaaagacaaagctaagccattttttgtgggagaataactcattttcaagtccccaaccctatgggcatctcacggcacatggatcatttcaggaggcttgggggtaaatgagtttcccaaagcaaagggagacagggaccaggagtctatgggctgggaaatgtggcttaaagacctgataagcttcaaatttattcccagggaagatgttttttgttgtggttagttggtttttggttttgttttgtttttgcactctccagaggagcctctggagggagcatgccctctttttggtaattaaccctttagcagctggcgaggccgctttgctgggggttgaagatagtcatagaggagggaaaaggggtgacggttttggaagcatctgcccacacctacaatgggcttaagcacaacttgctttctgttttcctgagttggcatggaggaattttttttttgtcactattgcattggtatgtgagttttctttggacaaactagcctccgatgaagtatgactttgtgggatacctttgtccatgggaaagagtgttgcataggaaaattgttcaagtctttgttctagttctcttattcagccacatctcttgtacattatccattacttgtgaattcttgcaagaaaaagatcagtctcaattcttgctttttgttttacttctatggaaactgaggcacagagcttcaaatgacatgcacattctcacagaggaactgagaatgggaacattatcatccaaaatgcctgcggaatgactggctgggtatgaaattgtgttgactgctagtcacagagcatattggtggacacagccctgactcctttagtgtagcaatgggaaagaagggaggaggagggaagggggtgaagcaaagaggagctggaactctgtctctgtccctaccgcccccccccgccccaccacctatgtttaagcctttgccaagaagagggagaaggagggaggaaggagggaagccaggaggctcaggaatttattgtcctgtatgcacaaggtggttgccccagatgcagctatgataatgataaataaaaccaaaacatttacagaaaaagtggtagcacttactgtgagggcccggtaccccaacacagctatcaggaatcatacagaaagaaatgaaatgcagccaaaggctttggcacccttggaaatcgttgactctgctcttccccactcccagtcgcaggctctgggcccatgactgccttgtgtccggtagcttccagtgctcagaaaggtactcctgaggctgaagtcaaacaaagcagtctaatcacaagcaagagtgtgaaggattctcctgttcctggaaatttcactatcatagactttttattcagccagttaataccgtgacaagtgtctcctcccctgcctcacctctctcacccctgccaggtccacacttggttctgcggacagagcccgagtcaagaaatagaagtggtgtgtgtgtttgtgtgtacatccttgatgtaaggagatgcctttaggtccggttttcccttgtggatgtaggctgttctgatcccctcactcttcctcaccctgtccagggacgtacattggcataatggctggctggagttcggggtgcatgctgagcctgggcagaagtcatctctgtaaatctgggtgagaatgaaccctagaaggtggcttctttggcaccattaacaaaatagtgagtgtgtggccaagaacttggatttaagtattagaaaaacctggtttgagtaatggtgtctctgtgtaagtcacaagttacctaatctaagcctcagtttcatcacctacaaaatatggatagtagtacccatctcacagggttgtgaacactaaaagcggtgctgcggtagagcacttagcacagagcttggcgtgtcataaacactcagtcaaggccagctatgaaattattacttcatctgagtcaaggaacccagaaaccggtgaagtgggccgaaagcaaatctctactcctgtccagcccctctcttccctcagtttcctgagggctgtgcaagcctcacctgtcagtttaatgagtggcccgagtaaacaagcaacccctgggtgctcagagtggggaccaccaacaccacagacacagcaccgtgctgggggcaggtggactccaggctgctggcctggctgcagccctcactgacggtggccttcactccatgtgaggaactgaaaagtggtcaaaacagagagtaaagcaagatgagcatttactaagaaacttctacatgccgagcacattcaccttttctttaagccttacgattcttgggagatgtgtatttttattcctattatcttagagaggttgaataaccttcccaaagtcacacagctaattagttgagatcagtgcttcttcctctctgccatactagggtgcaaaaaagacagtaatgtcagtccctgccctgaagaatttgtaatccaattagattccatgcaaaacacacatggatagaaccatcagagagtgctacagagcagagaccacaaattcttatattggctgatataatagtcttctgtcaaatgttcatctccctgcccccatgagtaggaacataactagaaaaactaagtgtggattagggaaagtaaatcctgactagatagtggatgctgttaaggaatttctattaatttcttttaggtgtgataatggcattgcagatatactttttaaaggattcttttcttttagacataaatacataaatatttatgggaaaaatttattggctttgggaattagccttaaaataatctgggtgggggtatatatagatgaaacaagattggccaccagttgacaattgttgaagctgggtgatgggtctacatgggtgttcattatattattttttctacttttgtatgtatgttcgaaaattttcataataaaatttaaaaaaaaaaaagaaagaaagaaaccaacattgggaggttggccttaagacagtcttaaggtctgtcttttccccagaaggacagccccaagatgcatactctggctattgtgcaaagtgagtctaggctgccagagggcccttggcctgcttctccctccagggtctccctccaagggatgggatattccagagatcctcctgattgtttaccatctttttcatgaatattccacccttgcctcttccaggtcaactcctatttgttctgcctgtctcaggtaccacttcctccaggtagtcttccaggactccctcaaggtcaggcaccttgtctgagcgctccaataccagtctgtaccaaagcccttgggacatgacttttgtataatcatctgttttcttgggctgtctcactcaccagcttgtgggacttggagggcaaaatgcaaatgcagggcccagcacacagcaggccttcagcctctgtttgttgagtgaatgttagcaggggattggggagggtagaggtgggacttggaagaattgaccccagcttctctccctccctttaaagggccagacctgtcagccagtgtagctccgccctaatcatccgggaactctccttcagcccaggtagaagacaaagcccctgggcaagctgtagccaacggttcagtgaaactcttgtccttgtctcaggtttcaggaaccggatcccaaccggtcaacttgtgtgtcctctttccttcccaagtgggaaagaaaatctccagcctgcctccccctcccttctccctggtgttagcaggggctggggattagcgcctgtacccagccagggtcagggcagctgagctggtgggggtggaggaaagctctccctagaggtaaactcgagaagcaaacccgaagcaacctactaatagcggctgctgggcctgagccctcctgaccttccactcccactgcctgcacagcctcagcagccccctcccccatcggttctagttcacagctcagtgtccatggtatctctacggggccgggaaggcccgaggccggcggcctaaccctcagaatgccctttgcagagggttgggacctatcaggagtgcactgagcagcacggctcaatgcttaaggagattaaccccaactggtacacacccaaaatagccctggaggctagggtgaagagggcagaagaggtgacgggggcctgttgacccagggaggcaaaagcaggcaccggagagggttagactgttaaaatctcgccctgaaatttgaaactgcctccatccagagtttgaaaaagcaactgcttgtttcttaaactaggtggtacaatccacaggtgtttgttttaaatattgttattatacgttttcttctgtatgtatataatatttaaagaattttgagggcaggtgtgatggctaatacctgtaatctcagcactttgggaggctgagacaggaggatcacttgagttcaggagctcgagactagcctgggcaacatagcaagaccccatctctaaaaaattaaaaattaaattaaaaaaaaagaattttaccagcctggccaacatggggaaaccccatctctactaataatacaaaaaaaaaaatggccaggcacggtggctcacacctgtaatcccagcactttgggaggccaaggcgggtggatcacctgaggctgggagttcaagaccagcctgaccaacatggagaaaccccttctctattaaaatacaaaattagccaggcatagcggcacatgtctgtaatcccagctactagggaggctgaggcaggaggattgcttgaacccgggaggcggaggttacggtgcgccgagatcgtgccattgcactccagcctgggcaacaagagcagaattccgtctcaaaaaaaaaaaaaaaaatgctgggcgtggtggtgcatgcctgtagtccagctacttgggaggctgaggcaggagaatcacttgacccgggaggcggaggttgcagtgagctgagatcgagccactgctctccagcctggctgacagagcaagactccatctcaaaaaaaaaaaaaaaagactttgagcaagtgaggcattagtgcctgctcccaccctcagtgctgccctctgggtgcctgccttctccttactgggacagtaggtataagagcttggttaggccgggtgccgtggttcatgcctgtaatcccagtgcttggggaggccgaggcgggtggatcacgagatcaagagatcgagaccagcctggccaacatggtaaaaccccatctctactaaaaatacaaaaattaactgggtgtggtggcgcatgcctgtagtcccagctgctcgggaggctgaggcaggagaatcccttgaacccaggagatggaggttgcagtgagccgagatcgtgccgctgtactccagcctggcaacagagcaagactccatctcaaaaaaaaaaaaaaaaaaaaaagagcttggctggatggaaaatgcaagagggaggcaggacagatggacaggaccaaggagcacttgtaaaataagatggctcaccagtgagagcgggatatagatggttaagaggtggggtctgagtcccactaaccaaggggaggttgctcccagcatcagagaaggctggaggcttcagggattctgggagcttcatggtccccaggctgggacaagaaggtgaggacaaagccccggtcttatctgtctatcctccttcagtctctctttctctcccccaggagactttagagtatctttgtcagaccgtgtcagcatatctacagctgggcccagagtgtgcagagcctgaatgaagcacaccaagagataggcagtctacacacatgtgtatacacacacacacacacacacacacacagcaggagcagaggaacaacacacagcgccatgcatgggggacaggagtggcgacgctaatatttacatgcctgccaagttggataaacaggaatatcctgagccatagaatgcaggcctttccagatcaggcccttccttatttattggaccacttttgtttaaccagcaaaagagcagtggtctccattcggttcatcagttctcccaatggcttgttagtgtctgggcagtgcggtgagacagaaagcccaggggtgtctggaatcagataggtccaggtttgaattctgctcctgccccttactgatccagtgacttggaataagttacccaaggaagaaagaacattaacttgattgagtgccttctggagccaaaggctttatcgatgctatctcattaacatagcttcttgaggcccaattacttcacctgtcaagtggggatgataaaatcatccttgaagggttatagtgaagattaaataggatgaggcattgaaagtgtttggcacatcacgagagaccttctttcctcactctaaactcttcagagtttgtacctgtatatctgccaaatcaacattattttatctctcacgaaattaaaaaaaaaaaaaaccatcagtgagtgtgaaggaatgatgaagagagaggggaaggggaggaaggaaagcagggaggcagggcttatgtaattactcgctgcctggccccagcagcctgatttctttgagcctctgcctaatttattttatgtcacaggctcaggggcccaaactgagttgctgggttggaaaaagacagagtgaaaggagattaggagaagattttgaggtggattctccttgtctgcaggcttccaccccagcacaagctcagaaaagccaaggctgctttgggagaacttggcttcagctgtccctggggcccactgcagaaagaacaagccgggttgtcgggatgctgtttacaaacagctaggaatagaagcacctcctgttcccacacccttccaccaccctttcatggacagcccacaggctccttctgattgttacttcaataggccttcctttgagatcaagccggcagggctggcaggacccctgtccctgagactggcaggtgaaaggtgctacatcctcaggcagaaattcccagggaagctctgagtgcagactatatgagtctagtggttagaatagtctcctcaggggccagctagacctgggtgcagatccagctctgctggttgctggctgaatgacccaaacaagtgacttcacgtcttggagcctgagtttcctcacctataaaatggaaattacggccgggcgcggtgtctcatgcctgtaatcccagcactttgggaggccgaggcgggcagatcacctgaggtggggagtttgagaccagcctgactaccatagagaaaccccgtctctactaaaaatacaaaattagccgggcgtggtggcacgtgcctgtaatcccagctactcgggaggctgaggcaggagaattgcctgaacccaggaggcagaggttgtggtgagctgagatggtgccattgcactccagcctcggcaacaagagcgaaactccatctcaaaaaaaaaaaaaaaggaaattacaatgcttagtcataggatagttatgaggtttcagcaaaataatccacataaagcactaagcagagtgctgggttggaaacctagtagtaaaggcccatgaacattagtttcctcccttcccttcactcctatccgctcctcccattcccattctcttcattcgttttatacacagaattcatgaatcatgctttatgtttacaaggagggaggaggactccattaaatcattaatttgccagctctttaatgagttcctattatgtactttctaaatgccaggatagagtagtgaacaagagagacaaggttcttgccctcatagaggttacagtctatgtttgtttgtttgtttttgagacaggatctcactctgttccccaggatggagtgcagtagcatgatcttggctcactgcaacttccatctcatgggctcaagcaatcctcccgcctcagcccccagagtagctgggactacagttgtgcaccaccatgcccagctaatttttttgtatttttagtagagatggggtttcaccatgttgcccaggctggtgtcgaactcctgggctcaaatgatctgcccacctcaatctcccaaagtgctgagattacgggcatgagccactgtgttttttgtttttttgtttttgtttttttttgtttgtttgtttgagacaggatcttactctgttgcccaggctggagtagagtagtgcaatctcagttcattgcagcttcaaactcctgagctcaagggatcctcctgcctcagcctcccaagtagttaggactacaggtgtgtcccaccgcgcccagataatttttaaattatttgtagatactggggtctccctatgttgccaaggctggtcttgaactcctgggctcaagtgagcctcctgccttggcctcccaagtgctgggatacgggcatgagccaccacacctggccaaggttacattttaatgggtgagacagacaatatatatatttccatatgcagatcatatgtagcatgcatacacataacatgtaacatatgacatatatcttctaaaaaagagtaatgtcagttaagggaagagtatatgacatatcaatgggagaccacttccaacaaagtagtcagggtcttcactaccaaaagaggtgacatttgagcagattctttttttttgagacagagtctcactctgttgcccagtctggaatgcagtggcgcaatcttggctcactgcaacctctgcctcccagattcaagcaattctcctgcctcagcctcccgagtaggtgggattacaggtgtctgccaccacacccagctaatttttttgtatttttcagcagggagggggtttcaccatgttggccaggctggtctcgaactcctgactttgagtgatccaccagcctcggtctcccaaagtgttgggattacaggtgtgagccaccacaactggcccatttgagcagattctaaatggaccgaaggagctagccttgggaagatgtggggaaaagctttccaagcagagggaacatcaaagacacaggccctggggtgggggcagggttagcatgtcagaggaaaagccaggccccaaaactagagcaggaggagtggggaaggagcctggaggagacgaggccttggaagtaagcagggttccgatcatgtggggacttttagggcagcagagtttgactttttattctaagtgccatgactttttattctaagtcattggagtgttttgagtaggggagagatgtgatctaatttatgcctttaaaaggctcattcttccagctttcagataaacagactgtaggggggcaagagtgcagaaatgagaccagttagaagggtgtttctgtctctcaggtgagagctcaaagatggtttgatgagaaatggaaactggctgatgcactgggggaaagagaagagtcggggtgatcagtactgcctaagctattgggtgaatttgatgtcttttttttttttttttttttttttgagacaaggtctggagtgcaatggtgtgatctcggctcactgcaacctccgcctcctgggttcaagtgattctcctgcctcagcctcctgagtagccaggattacaggcgcctgccaccacgcccggctaattttttgtattttcagtagagacaggggtttcaccatgttggccaggatggtctcgaactcatgacctcaggcaatctgcccacctcggcctcccaaagtcctgggattggccaggtgtggtggctcatgcctgtaatcccagcactttgggaagctgaggcgggcagatcacttgagatcaggagttcaagaccagcctggccaacatggtgaaaccctgtctctactaaaaatacaaaaattagctgggcgtggtggtgggcacctgtaatcccaggtactcgggaggctgaggcaggagaatcgcttgaacccaggaggtggaggttgcagtgagccaagatcatgccactgcactccagcctgggtgacagagtgagactgtcaaaaataaataaataaatgaataaataaataaataaaactaaagtgctgggattacaggtgtacaggtgtgaactaccatgaccggccaaatttgatgtcctttactgccatgggaaacagcagagaaggagtggttttgggaggtgaagaattctgatttgaacaagttaagtttgttgtgcttagtagacccccaaggggaaatgttgggttgacaggggttgcactccagatcttgtctcaaaaaaaaaaaaaaaaggacatcaaattcaccaaatagcttaggcagtacggatcaccccgactcttccctttcccccaatgcgtcagccagtttccatttctcatcaaaccatctttgagctctcacctgagagacagaaacacccttctaactggtctcatttctgcactcttgccctcctacagtctgtttatctgaaagctggaagaatgagccttttaaaggcataaattagatcacatctctcccctactcaaagtctggggctcagtgggaagaggggatgggagattaaatttgggattcatcagtctgtggatgctactgaaagccatgagcctagaagagatcacttagggaataaatgtgaatggaggagagcagagggctgaggccccagcccttcattatacctacatttaggtgttggcagaggagaaggagccaatgaagagactgagaggtagaggaaattcagagtggtttcaccaaatcaggtgagaaaggatttccagaaggagagagtactgtaccacatccattcttgctgagaggtttaataaggtgagacagagaatcaatcacagtaattggtaagatggaagccattggaaccttggcaagaatgatttcactgtggtgaatagtggactcaaaagagagaatatggataaggattggagatggagcatctagataagtctcgtttttcctcagttttgttctaatgggaagcagaatagtagggtggcagctggagataaatgtggaatcagggaggatatttttgaaagacaaggaatattatagcatggctgatggggataattcagtagacagggagactgataacaccagtgaagggggcaaaaagggatagaatgcagtcgaggggtcacatctcagcagcaggtaatcacttaggagagaaggcagcagagatgggccaagatacagccaggttgataagtgtggtgatgggaggttgaggtttgcctcatacgtgcaatgtgctgctctggaaggacagcactggcagccataggctggtctgaagggaggagaaaccaaggaggctatgacaatagtcagaggttaagcctcaggtcacaagaaaaatgctcagtgctccccggatgagggcagagaaaacatgaaagtacttccggacatgaaatctggcatgagaacagtcaacagacaacagccagctgccagagctgcttgaaaatccagtagattttcacctccagtgcatcgatcttctgtcccttaagtcacccatgcccaaggagaaggagggagcacactggtcccttcccagcatatgactgacagctggcgtggtgggacaagcactggacttgcaagccaaaccagggggacctggggctaattcccaacttggctatttatcagctgggtggtctcagacaagcatttaatatttctaagcttcactctattttatttttattctttattgccttgtccatatttcatttttacttgacaataatgtttttataacatttttattggaatataaaatatttacagaaatgtgcacaaaagtgtggagtttcatgaattatcacaaaatgaacaagaaactgaatgttgtcagcaccacagcattgtccctgcccaagcttcctctccaaagatagcccctatcctgatttctaatcccctaggttagtcttgccatatatatatatatatatatatatatataatgtatgtatatgtgtacatatataatatatatatgtattatatatatatgtattatatatatagagagagagagagagaaaggctcatggagtgtgtattttttgtatctggcttctttcactcaactttatgtttgtgacatgcaaccatgttgttgtctatagcatttttttttttttgagacagagttttgctcctgttgcccaggctggagtgcaatgacgagatcttggctcactgcaacctccaccttccgggttcacgcgattctcctgcctcagcctccaaagtagctgtgattacaggcgtccaccaccaagcctggctaatttttgtatttttagtagagatggggtttcaccacgttggccaggctggtcctgaactcctgacttcaggtgttccactcgcctcagcctcccaaagtgctgggattacaagcgtgagccaccacaccatctgtagcatttttaaaccttcattgctatgcagcattttactatgtgaatataccacagtttatttattcatttcactgttaatggacatttgggttgtttccagtctgggactattacaaacaatgctgttatgaacattttcggacatttttagtgcacttctgacttcatttctgttgggtatgtacctaagaatggaatttctgcgtcgtagagaatgcatagtgaactttaatttcttcttctgtcaataaggatgataccacctaatttgaaggtctccatgaggaaaagatacaaaaatttgaaggtttaacatagtgctttgcaaacagtaggcactaagttaagtgatagtcattaacatcatttctttctttttgttttttctttttgagacaaggtctttgtcgcccaggccagggtgcagtggtgcaatcttggctcactgcaacctctgcctcctgggctcaagtgatccttccacctcagcctcctgactacaggtgtgcaccaccatacctggctaatttttttattttgagtagagacagggttttgccatgttgcccaggctggtcttgaactcctaggctcaagcgatccaccagcctcaacctcccaaagtgctgggattacaggcctgaaccaccactcccggcccatcgtttctaatggagtacatctttgagagcaactagatgctgtataaccttttcagcgtgttctgcctcctgtcctcctgaccctctctatcgagatttggacacttcactaaagcccaggtcagattcctctacctcaggattcatctgttccaaagatgatgacttagaggcatatcccatttcatggcctcttctcattcctagccttacctactctcagtatggactgacttctcttccactcaattttcaggctttacttgtaattttcctctttaacttatatgttactatggttattgtgaacattatcctcaattctcatgctcagtcctccccaaccttccatcacccctagcctgaatgaaagtaaccatttagcaattctattgtgcatccaagctactgaacatacccagcagcctcagatagcactatattggtgcctctgtggattaaaaccctataacctcagccaagccctcaaagctgcccagaaaacatctacactccttcttctcactcctctgggacactattctaaaaattagtttgtttttttttgatacagggtctggccctgtcacccaggttggagtgcagtggcatgattatggctcactgcaaccttgcctcctgagctcaagtgatcatcccacctcagcctcccaaagtgctgggattacaggcatgtcccaccgtgcccagccagcctttctttacaaactctcttgtcccatctctcttttcaccctcaacagatgatctagcctcatatttcgtggagacacttgaagccatcagatgaaaatgtcttcaaatttctcttctgtcacctgaaaacttgtaagcatccatgtatgcaagttttcgcctttctctccctttttatatgcaagctttctctccctttttttttttttttttttgacagagtctcattatgtcgcccaggctggagtgcagtggcaccatctcagctcactgcaacctcctctgcttcctggggtcaagcgattctcatgcctcagcctcctgagtagctgggattacaggcacgcaccgccacgcccagctaatttttgtatttttagtagagacgaggtttcgccatgttggccaggccggtctcgaactcttgccctcaagtgatccatctgtcttggcctcccgaagtgttggaattacaggcgtgagccaccgaacccggccttccgtttctcttttatcccatggaaaggatatccctcttctgtcccagactattacccaaacccactttttagaatcttttctctcctgcctccacacgacctttgctcctttaaacatctctctctctcttcaacattcccttttactggctctttctccccaattcccacattctctcctttccgtcttagctaagctgtaggaaatggcatccatgctcactatcaccctggacgtctctgcccccgcactgcacagacatcagccttgatgaggtaactggggacctccttgttgctttatctgaacacaccttttagtctttattctatttgtttactttgtggaatttaaccactctgtcattcttttaaacactcatttccctcggtgccaatacagcacattctccttgttttcctttcatctctctagctgttccttcttaatctcctctgtgagcagctcatactctattgcctaaatatgattgtttagggctctgcccttcctatgcagtcttcatggctaccttcatccaaccccatggattcagttatccccgtatgctctctttctatctctggcctagatctctattttgagttctagatcattcagttgtctcttggacacctcaagtgtctcaaattcaactggtctgcaaataaattaatcatcgtcaccccaccccacccctaaacctgtttttcctcctgtgttctgcactttgatgaatagaagtaccatttaatcagacacctacatcataaccctgggctgtcctgctccaatccctctcccagtgtctccagactttcctagtgataggatcctgttgtttctgcctctatgatctctctgaactctgcccctcctcgcaattcaacttctattactcccatgcatatcacttatcaactagaagaacgtcacagcctcctaactgatctcccaacctctcttctcgtgccattggaatccatcctccccacagttgaccttccctgtgtaaaagccttcaattactcagtgtagcttccgtgatcaaattcacacttcttagcatggcttagaaagctgctgatgttccagtgccttcctatttctcaagctacgaatactcttctccttgactctcaccctacagttgtacttgaccattggttctccagagcgccaggctttatcttgcttcctctgtgcctttgaacatattgtcgcctccaactgggatgccaagcctagccaaccctcattcctctttcaaggctcaactcaggtgacactttctctagaggctttccggacccccccagcctaagttgtgtgctccacctctgtgttcacaaagcacctcctgcaagttctggcacctcctgttccattcgcatgtaacacatcatttcagcattgtctgtttctgtgcttttcccaaacttcttaagggtgagggctgactcttattcatcttcatgtccccagcagtgaacacagtccctggcttaatggatgcctgttgaatgaatgaaggatgaggaatttacaaaggcagttctatcatacttgattgaatctacaaaatttgtaattcatctatacccttctgagactatttgaaaatatgattttgtatccaacttctcaaatgaagaaagatttggcagtgatccttttttatcctctttttaaaaataaccaattaaatcagtctaaaatttacactctgaggtctgaattgttgggatagatcactgccatatttccccttcagtttaaacttgttccactttttcttcatttccttgcaattctgtcttccagctctgtagtaacctgagattacagactaacatattaattccacttgccaggcgtggtggctcatgcctgtaatcccagcactttggtatgccgagtcaggtgaatcacctgcagtcagaagtttgagaccagcctgatctactaaaaatacaaaaattagctgggcgtggtggtggacgcctgtaatcccagttacttgggaggctgaggcaggagaatcacttgaacccaggaggcagaggttgcagtgagccaagatcacgccactgcactccagcatgggcaacagagccagactccgtctctaaataaataaataaataaataaataaacaaataaataaagtccacctatgatccctggggccacagatagaccctaaagaaaatattaattatatttttgcaggccgggtgtggtggctcatgcctgcaatcccagcactttgggaggccaaggtgggcggatcacttgaggtcaggagttcaagacaagcttggacaacatggcaaaaccccgtctctactaaaaacacaaaaaagttagccaggcatagtggcacacacctgtaatcccagctattcaggaggctgaggcatgagaattgtttgaacccgggaggcagaggtagcagtgagccgagatcacgccactgtactccagcctgggcaacagagggagactctgtctcaataatagtaataatatttttgctgataatttgctctatatgcacccagataaggcctttagctcccatcatctggattcttccataaaatatctggagaagttcagcagcattgcctctagatctaggaaaagtaatacagctctcctagagaacttgctataagcagatttccctttggatcacacacacaagagcaggagagggagtggccctcttcacagcactcacagagcccacccctttgggaggcccagtgcttgggtatgtggctatgatggcctggaagttatctggatataccaattctgcagctgggtcgacacagacttgcctttctgacgcccaagtagtgaggctggagcaaaggaggagcagagctgggattaggtccttgtaggcaactgatcagcttttctcagccaggcttctgtaagagaattaagcgctggaaaaaatgaattgagagactatatcctcaattcccccgtcttagtccattttgtgctgctataaaaaaatactacagactgtgtgatttataatgaagagaagtacattttgctcatggttttgaaggctgggaagtccaagatcaagggcctgtatctggtgaggaccttattgctgcattatccaatccatggcagtaggcagaaggacaagtgagggccaaagagagccaggaagttgaaattgtccttttataacaaacccacttccatgataatggcattaatccattcatgagagcagtgcccccatgacccaaaccctttccattaggccccagctcccaacatcactgcactggggattgagtttccaatgtatgaactttggaggacacattccaaacacagcactcccaaagattctagctggtcccattctgaattcatagggaagaaattaactctatataatggatgccttagggcagtaagggcttaaattgtcttctgaaattccagttgtcaagggctgacattgcgccattttgcttacactgagtttcctcaaggtggatcatctcacctaccccaatggcagcatctcttccacttgctacttagtgataacccacttgtcccatgtcctcaacttcactgaaaagtataacaaattcttctttttttttttttgttttttttgtttgtttgttttttgagatggagtctagccctgtcaccaggctggagtgcagtggcgtgatcttggctcactgcaacctctgccttctgggttcaagcgattctcctgcctcagcctcctgagtagctgggattacaggcacacgccaccacacccggctaatttttgtatttttagtagagatggggttacaccatgttggccaggatggtctcaatctcctgacctcgtgatcctcccacctcggcctcccaaagtgccgggattacaggcgtgagccaagtataataatttttaaatcaccaagaaaatatctaataatgatcccagagtactaaagactcaagtgttccagtggtcaaagttctttcaggttgggaggcttttggttttacttccagtctctgtaatctttgccttaaaagcaggagaagggggtgatacaaagaacacagacatgatatttctaaatttgttttatttgaagaaaagtatgcttataatgtaataaggctcatcatagacagtatgcaaaacgtgggaaaaaaaggaaaatagccaataattctttgtcttagctaaagatatcagccattgtcaattttcttgtttgtttgtttttgagacaaggtcttgctctgttgcccaggctggggtgcagtggtgcaatctcagcttactgctcccacgtgccaccactcccagctaatttttttgtattttttgtagagacagggatttgccatgatgtccaggctagtctcaaactcctggactcaagcaatcctccctcctcagcctcccaaagtgctgggattacagttgtgagctacggctccctgcttcagttttttctgagtgtataattctgtatgtatttttctttttgtagttgagatcatttaatgcacagccacatattcacataaattgtgttccctaccttatttatttatatttttgcttatcatattataattgcttttcccatgtcactaaaattcttcctaaacattgttttcagtggatgtcatcatagtctattgtatggctgtgttgaaccatttgcctatatttggacatttacatggctcccaataaatacactttccaaggccctaaacagatccccagagcctcagcacgggctccttctcttggcctttggcgcccatccccagagagatggagtcagccaaacaagatgataaacagaacagttaacacactgcttccccagctgagccttatgggctgatgggtgaaacaaagcccctaaaagagaaaaaagactcactgggcactggaaacgcagagacttatggtcagctcacagcacagacactccatagcccagagaaacataaggccacacatgttattcttttagaggatcaagttcctaatattggaccatctgccaagcagagcaaagccccacctccctctcgctttgactccctgtggggaaatgtgtcggtttgtatgcagtatagatagagcacatatgcctggtttttcttcctttggggaggaaaaaaatgttactacctaaaaagaaaactggctgggtgtggtggctcacacttgtaattccaacactttgggaggctgagatgggaggcctgcttgagcccaggagttcgagaccagcctgggcaacacagggagaccccgccccccagtctctccaaaagaatttaaaaattagccaggaatggtggtgcacgcctgtggttccagctacttgggaaactgaggtgggaggatcacttgagcctgggaggttgaggctgcagttagccatgatcacaccactgcactccagcctgggcacaaaggaagaccctgtctcaaaaaaatttaaaaaattaaaaatagaaaagagaaagagattgaaaaaaaaaaaaacaagcctccagccttgaaaaatttcaggtcttgggtggatgtcaagaagagaaggtcaactggttcatcctcctgcttctacagggccctaccctaaaaacattccacaccaataccaaaccataaccaaatggtcatgcaaagtaattttccccttccaagaaaaatggaaagtgtcttactcccagaagcttgtaggtaagtacttagttgctgtcttagaacatcacacaatatgccccagctcatccatgcgcaataaaagcagaacctaatgccttgggtctgaagatttatgggcttccacatacgttatctcttttgatccttgcttcagccttataaggtagacaggggaggtaaattttaatctacttgacaggtgaagaatctgaggcttagagaggtcaccagctggtggccaaggaagatctttttttttttcttttttttttgagctggagttttgctcttgtagcccaggctggagtacagtggcacaatctcagctcactgcaacctctgcctcctgggttcaagcaattctcctgcctgagcctcatgagctgggcttacaggtgggcgccaccatgctggctaatttttgcatttttagtagagacagcgtttcactatgtcggccatggctggccttgaactcctgacctcaaatgatctgcccgcctcagcctcccaaagtgctgggactacaggtatgagccaccacgctcagccggaatatcttgaactcttttctttgtctctctcttttttctttttccagagatagggtcttgctctgtcacacacactagagtgcaatggtgcagtcataactcactgcagccttgaactcctggcttcatcctccggcctcagcctcccaagtagctacgactgcaggcacatgccactatgactggctatttctttcttttctttctttctttctttctttctttctttctttctttctttctttctttctttctttctttcttttttttctttctttctctctttctttctttattcttcctttctttcttctttcttttccttccttccttccctccctccctccttccttccttccttccctccctccctccttccttgcttccttccttccttccttcccttcctccctccttccttgcttccttccctccctccctccttccttgcttccttccttccttccttccctccctccctccttccttgcttccttccttccttcccttcctccctccttccttgcttccttccttccttccttccttccctccctccctccctctctccctccctccttcccttgctttctttttttttttttttgagacagagtcttgctctgtcacccaggctggagtgcagtggcgctatctcggctcactgcaagctccgcctcccgggttcacgccattctcctgcctcagcctgctgagtagctgggactataggtgcccgccaccgctcccggctaattttttttttttttggtattttattagagatggggtttcaccgtgttagccaggatggtcttgatctcctgacctcgtgatctgcccgcctcggcctcccaaagtgctgggattacaggcgtgagccactgtgcccagcctctctctttcttttctttttctttcttttctctttctttcttttctttttctttcttttctttcctttttctttttctttcctttctttccttttctttctttctctctctctctctctctctctccctccctctctctctctctctctctttttcttctttcttgttgagacagcatcacactcccggtcacccaggctagaatacagtggcacgatcacagctcaaggcgacctcgacttctaggcctcatatgattctcccacttcagcctcctgagtaactgggactacaggcgtgcatcaccacattcagctaacgttttgtatttttagtagagatggggttttgccatgttgcccaggctagtctcgaactcctgaactcaagcaatctgccccccgttggcctctcaaagtgctgggattacaggcatgagacactgtgcccggctacaattaaaaacaatttttttttcaatagacagggtctcactatgttgtccaggctgatctcaaactcctggtctcaagggatcctcctgcctcagactcctgagtagctgggattacagacttgagccactgtgctggctctgaacactttcttttgacctcaagttgcaacaaactgtgcataacttaatagaaaaaataatctgtccctccagccttctttttgggcctccatctgaatgggagatgcatctctttgttcagcagttatgaagcatccactgtgtgtcaaattccaggatgggtgttgctcagtcttggtggccctttcagcagcagctttcctgtcaccgtgctgcactctggaaaccctctgcactctgagatgggtactggccatgctccagcgctgccctctgggagaccctggggaagggctgtcaagagtcactcctggcctggcgcagtggctcacgcctgtaatcccagcactttgggaggccgagacgggtggatcacctgaggtcaagagtttgacaccagcctggccaacatggtgaaaccctatctctactaaaaatacaaacgttagccgggcatggtggtgcgcacctgtaatcccagctactcgtgaggctgaggcaggagaattacttgaacccaggaagcgaaggttgcagtgagccgagatcgtgccactgcactccagcctgggtgacagagtgagactccatctcaaaaaaaaaattcactcctttaaaatacccaatgcagtgtttttagaaaaaaagcagtattcagtatattcggcaaatatactgaatataatagtgtattatatatattatattatatataacaatattatattcagtatattcagtgtgaatatatattcagtatattcacaaagttgtacaacaccactacctgattccagaatattttcatcagtcccaaaagaaaccccacagctatcatcagtgacccttcatttctcctcccaccagccactggcaaccgctaatccattttctgtctctacagatttgcctattctggacattttgtgtacatggaatcgtaaaatatgtggtctttcagatctggcttctttcagttatgttttcaaggttcatccatgatagagcatggtactttattccttttaatggctgaatattataccattttaatgaggtatgacattttgctgagtcattcttcagttaatagactttgggtgctttccatttgggggctaataggagtaatgctgctgtgaacatttgtgtggaagctttttgtggacatatattttcaattctcttgggtctgtattgaggcatgcaattgctgggtcatgtggcaactctatgtttaactttttgaggaactgccagactgttttcccaagtggttgcactatttatatcttaccagcaacatacaaggggtccaatttctccacatccttgtccacacttattattgtctgtctttttgattatagacacccaataggtgtgaagtatatctcatcacggttttgccaatctcaaagggcatggattttgtttcattaaataatgtggtgattttctttttctttttttttttgagatggaatctcactctgtcgcccaggctggagtgcactggcatgatctcagctcactgcaagctctgcctcccgggttcacgccattctcctgcctcagcctcccgagcagctgggactacaggcgcccaccaccacgcctggctaattttttgtatttttagtagagatggggtttcactgtgttagccaggatggtctcgatctcctgacctcgtgatccgcccgcctcagcctcccaaagtgctgggattataggcatgagccactgcatccggccataatgcggtgattttcttgacctattctgtaagtccctttcctcttcctgataactcacttttcagagtcaccatatttactcccgtggttttcattgctacgtatacaccaatgactcccaaacctacctgtcaagcctagatctcctttctgagccccagatctttttttttttttttttttttttttgagatggagtctcactctgtcgcccaggctggagggcagtggtgcaatctcagctcactgcaacctccacctcctggggtcaagcagttctccaacctcagcctcacgagtagctgggactgcaggctcgcaccaccatgcccagctaatttttgtatttttagtagagatggggtttcactatgctggccaggctagcctcgaactcctgacctcgtgatctgcccgcctcagcctcccaaagtgctgggattacaggtgtgagccactgcgcccagcccagatctttattaatgccaacctgttaggcatttaaattttgtcatggccaaaacagttgatcatctcaagtgccaccctcatctccccgctccatattccccgccatggttataagcatcactctctaaccaggcaaccaaactggaaatcagggagtcatcctccacttctcctcggcattgtccacttcactgaatcttattaactgtaccctagaaatgtccatggaatgcatctccactcctctgtgttcactgctcagcctggtccaagatctcatcatttcctttctttttttctcttctttcttacttttttatttatttatttatttttatttttagaaacagggtcacactatgttgcccaggctggtctcaaactcctgggctcaagcaagcctcctgccttggcttcccaaagtgctgagattacaggcgtgagccaccgcgcccagcctcccaccccctattctatattcgctgggtcctgcactgtgtagaggccacttggcctccttgatttaatggcttgacatccttgtttgctccctgtcttcccagtaggtcttggcttttctttctcccttccagtagaatatccagacccacctcctaattgtccttgagcttaaagactcagcttactcctcagctatttctcaactatgattgacttcctcagcaagcaagtggaattctggtctctgtggccttggcataggaaaaaccggtgtctccaagggcctcagctgctaaaagggagctgcatttaggagttgtattgaccctgtagcatgatgtctttccagaacaattcacaaggcctgggaaagtatgtcattttactggggtagtaatccccagtcagagagtcaatggtgggtgggaggctgaggcgggcggatcgtctgaggtcaggagttcaagaccagcctggccaacatggagaaaccctgtctctgctaaaaatacaaaaattaaccaggcgtggtggtgggtgcctgtaatcccagctacttgggaggctgaggcaggagaatcacttgaaccccggaggttgaggttgcagtgagccaagatcatgccattgcaccccagctgcctgggtgacaagaacaaaacttggtctcaaaaaaaaaaaaaaaaaaaaaaaaaaaagagagagagccagtggcgggtggagatggcattgaagccaatatattccttctactctttgaagtcctgggctcttctggagactttaggaagacactgaaaaaggctgcttacaatagtttagtggccaggatggagagatgtggactggaaggtgatgcaggtggatgctgattggtggctccctggaggcctgtagtaggataccagagagttctgccctggagtctgccctggttagtggacaaaaagatccagaaggcacatgtaccacactggcagattatctgaagctgagagtcacagtgagcttttaaacagcagaaccaggatttagaaaattctagtcaggctggaatggcaggcttagtctaacagatgaacttttctagcccacagaaaagcagcctcagggagaggacccaatacctacagagcactcacatagaagagaaggggtcaccttgctttatacagtccctgggaataacaggaccaaatgggctttctgacacagagtcaggttaaaaaagaagaaaaggggccaggcgtggtggctcatgcctgtaatcccagcactttgggaggccaaggcaggcagatcacctgaggtcaggagtttgagaccagcctggccaacatggtgaaaccccgtctctactaaaaatacaaaatcagccgggcatggtggtgggcacctgtaatcccagctacttgggaggctgaggcaggaaaattgcttgaacccaggaggcggaggttgcagtgagtaccactgcactccagcctgggtgaaggactgaggctctgaccccccaaaaaaaaaaaagtttctgtcttttagagatacacactgaggccaggcatggtggctcacacctgtaatcccagcaaaagtgaggccaaggcgggaggattgcttgaggccaggagtttgagaccagcctgagcaacatagcaagaccccagatctacaaaaataaaagttagccaggcatggtggcacatgcctgtagtcctagatactcggaaagctgaggcaggaggatcacttgagcccaggagtttgaggttatagtgagctatgatcataccactacactccagcctgggtgacagagtgagaccctgtccctaaaaaagaaatagagtacacactgaaatatgtatgcatgaaatgatacacctggaatttgctttcaaataatgtgagattgtgacaaaaatgggtgggcatcagatgaaacaagattggccatatgtagagaatcgctgaagctgggcaatgggtaccttgaggttcattgtgctgttctctctagtttgttgtacagtcgaacttttccacatataaagttaaaaagaaggaggaggaacaaaagaagaagtgttagccaggcagagaagaaagcgagaggacatcctgtgtggcaggagcagcatgcataggcaacaagacccaagagagcccagcatggggtagggcagcaagacccaagagagcccagcgtggctgttcctcactgtaaccagagtgcaggcaggaaggggagggcgcacagaggcaggcacaggccaggtcacggagggctttgttgccatgctacaaagtctgcacttcatcctgaaagcatgggagccatggatcagaatcacattttgaaaggtctttctggagacagagtgcactcaaagagaaggaagacaggaggcagggggttcagtggggaggcaagagatgatggaggccgcaaacacagcaatggtgaggggatgtgaggaagctaatctcagctatgttaggaaggtgggatgaagggaacgtggtgagggaaaaaggaagcgtcaaggctgatgtcccagtgtctgtggggtgggagagccattcctgaagagggagaaggcgggaagacagagagctgcaccatccctgatccctggcctcttaggcctaggactggctacagaatttgcagggcttagcgcaaaatgaaaatgtgctcaagaattactaaaactttcaagacgatgacagcagagaattaaaccaagcgtagggccctctgagcatggggccctggagcactgcagaggtcagacaccataaagctgctcctgctttagccaatgtacccttttctgtttagaaggaacaggagaggggctgtatgaaagccaggcctcctgctcacagccccaggcagtaaaagaacagtatgttccttctgccaccctccgggacctaagtgggacccagaagcctgggacaaatagcttgcatttgtgtagatctttacaacatttcccagacttgcttgggttttccttggtgctgggataaaatgaagaagcagaaagtactagccaggcacttcagagagcagagtgctacagtgacttgtttatctccccaaagagatttcccggtttctccaaaaatggggtttgctacaagcttcccagtatgagtcaccagaccagttggcaaagcatttagttctgctgagagcaatggagttgacccttcattggccgagaagatctgccacaagaaccttcatccccctagtgatgggttctgcataacccccaggcagaagccagaatggcgctgactgtgaagtcttagctattgcaggctgtgttgcatgccctcacctcaaaacgcctctgtctttctctacttgcagtgaatgcagaagccttggtggtaggggtaagggcctaggtgaaacacagacaccgctcaccgtgccttcctttctggtgcctcttgatggctcttggcaggcttttgaggtcaggccaccttcccccatttaccatccctttcactagaaaccctggtccttaaagactcaaggcaggcaagaaccctcccagccttggcagagtttggtgacacatgcagtgtaagtgcccagccacccacatctgcacattatccttgtcttttccagaaggtttctttgctccccttccctacaaagacagagcaggccctgagatggtggcgttcactcctcttgtaaagcctggtctcccgcaggactgcatcagaaaatgccctttttttcccaggttcacaaaccgctgcccttttcttggctgccattgcgccactccgacccctggagatcatcttgggaggtaaaaatgaatcatggcgtttctgtttatgctggagctggaggcagtgcctgagaccctttggccctctgctcagcactgatgtttatcaccggggctgatgtgtaattgctggaacagagccaggcgaaggtcaggctgcgaggcaggtcctgggcacagcacagccgggctgaagactgagcacagtgacggggaatcccctccctcccacctctggccccatccatccctcctccccacaccacggcctgatgcctcttggtttttaattttgttttgtttttgctgtgaaactcagttatttaaagacaattttgtttctttttcataaaacagcttttgttggtttttgttttgttttgttttgttttgttttttgagacagggtctctctctgttgctcaggctggagtgcagtggcatgatcacggctcactgcaacctcgacctcccttggctcaggtgatcctctcacctcagcctcccaggtagctagggctacaagcacatgccaccacgcctggctaatgtttgtattttttgtagagatggagtttcaccatgttgcccaggacggtcttgaactcctgggctccagcttcccctcaccctgaccttccaaagtcctggaatagatgtgcctttgttgtatttttctgatcataaaagtagttcaagccaggtgtggtggctcacaccgtaatctcagcactccgagaggccaaggtgtgtggatcgcttgagcccagaagtttaagaccagcctgggcaacatggcgaaaccccgtctctacaaaaaatacaaaaatccgctgggtgtggtggtgcatgcctgtagtagcagctacctaggaggctgaggtgggaggatcacaagctggaggaagtcaaggctgcagtgagccgtgtcacaccactgcactgcagcccagaggagagaatgagaccttgtatcaaaaaaaaaaagttcagacattagacactgaaaggcttcggatgggtctggccttcagcaaggtccctggggctgccgtgcaaggatcgccctggaggaggtcagcgaaaccgagaggaggttgttgctataaccccatgagaggtgatagtggcctggaccaagggaacatctgtgaggatggaggagagggattgatctgagtggggttcaggctgtagtatctgtgtgcaggtaacgagggagtatataataggtcgatttcccagccttcccccaaaatcacttgggctactggtagggaagggtgagtgagtgcagagcggggtgcagaggggtccacgttgcctccccacagatccctcctttcctcttcccagccgggttctgattggagtcactgggtgtttagaggagccacttgcccagatagggaatagtgcaggggtcggcaaggcagtgggggaagataaggagtccagtttttgaggtactttggggcacacaaaccaagatattcattagacggtactaccttcctagtagtgtctggcccagagatccagctttgagagacatcagtacgtagaatgcagctgatgccatcagaatggatgagataatccggtgagaggctctaaaggtgaaaacaaaggaggcctaaaataagaccttgccaacacccacatgtctcaaggaagagggtccttgaaggaggcctaaaggagctatcagagagctaggaggaaagccatgaaggctgcggtggaaaccgatggggaagcgttttgaaggaaggacctggccaatagcgccagatgcttcccacgcagtttgagcaatatatgaaataaaagataaatccgacttagtgacaggagggtcagaagtgatctggatgaaactaatttccatggaatgttgggggtgaggcaagagtgtgttggattgaggaatgaatacggatcaaaaagtagagctctttgaggaagtttgggtatacgggaaggctggcgctacagctggaagggactgtggacagaaggaggatctgattaaccgggagagatgggcaggtttaaagggtggtgggaaggggccaggaaagagggagaggctaaggctgtggaagagggtgcgggagtgcaatgtggggaggaggggtgggcaccagagtgcgtggggaggggtgagcctgggcaggaggagagggaaggtgaaagatgagcctggaggtgagtttgtagaagaggtggcaggaagttggagaattgccatgggttgtttcctctgtctgcctgggaagaaattagaggagattgtctgccaagaataggggtggagtgggacgagagatactaagagaagggagaagaattcggatagatgctatgaagaaccaggagagagctagacccataatgacagttaccttttattgaaagcttcctgtgcagccacaggaagtggatgtgttatccactcacctcaatgaagccttaataccgccccgtaccagatgtgatccccgttttacagatgaggaaggcaaattaacctgtccatgttgacataagagcaaagtgtggaaccctggccttctgactctcaagctggtcctcagcattggcgccacttgtgagtgttagggttcacaggggctgcagacagtggacggcaccacgtggggtgtgggctactctccccagatagcccagcacctgggaggaggagccacacaggcctgcagtcagtgctttggctgtagggttggggctttggctggcacgtgtgactggggttgaggatactggcaaggtgatgactgacgtgctggatagaacaagaggtgaagcagtcaaggtgggtggtgcagagaagtcagaatttgggtctcatggccagcggttccacttttgggtccatctacactcccaaagagttgaaagcaaggacccacacagatatgttcatagcagcattattcacaatagccaaaaacagcccaagtgtctatcaatggatgaatagataaacaagctacataaattatacattttatgtataatttacataaaatgctaaaattatcaaggtatatacatacaatggaatactattcagccttaaacaggaaggaaactctgaattcaaattttggaggtgtccccatttcacaggcagcagcctccatttggcagggcttaagcctcactcttgcccacataccttcctcagcagcaaaagggttagcaatgatctagatgagaattgaggattaaggaggcgagccttgtcctggaacagcatagtttttattttttttcttttgagacagagtctggctctgtcgctcaggctggagtgcagtcgtgcaatctcagctcactgcaacctctgcctcctgacttcggacgattctcctgcttcagcctcctgagtagctgagattacaggtgctgaccaccatgcccggctaattttttgtatttttggtagagatggggtttcaccatgttgcccaggctggtctcgagctggtgacctcaagtgatccacccgcctcggcctcccaaagtgccgggattacatgcatgagccactgtgcccagcctgaaacatcactttctgagtggtgatccaaggaaaagccactaaagaaagtagctaacagaggacagttctgggagttgtgtctttgcttgatgctgacaagtctcttgtttgctaaaacaaactcaacttctttccagctgctcagtcctttgggagaaagggtgaagatggacaataaaatggctgtcagtcccccgcctggtcccagcttcccacctctggcccagtgaggctgggcttctccttgtttactacattcctttagggaacgtcagtggtgggcaggctctgggagctggcctgccttgcctcgctgcctctcagctcccaccgccttcctcacagccctggacatcctcaagtttgcaggccttagcaggtaaccaaacaccctggtgtccttctcagtgtggactccaggaagtttgtttttgttttcgttttttctgagatggagtctcactctgtcacccacactgtcacctctaggctgggagtgcagtggtgccatctcggctcactgcaacctctgcctcccgggttcaagtgattctcctgcctcagcctccggagtagctgggattacaggcgcccgccaccacgcccggctaatttttgtgtttttagtagagatggggtttcaccatgttggtcaggctggtctcaaactcccgacctcaggtgatccacccaccttggcctcccaaagtgctgggattacaggcatgagccaccgcacctggctgacaccattttcttattcattcattcagcaattctcagcatctactatgtgccaaggcatcatactgtgtgccaggcatcgagtcagtaataaaccatatttcatgtccctgatcctgcaggggagatggacaaagaaacagagtgataggggccaagataagggagggagtgaagggagctgtgggggagggggaggagaagggcttgggggtcaggggtcacttcccaaagcacaccatgcttgatgctgacattgatcctggaccatgagtagagtgaggccgggtaaaaatggggtggagcaatgcctgtgcgaagggacaatgttgtaggatgaagcttgggtataaggaagtagatgaggctgcagagggaagcctcttcctctacatgctctgctccatccatttaccaaacttccactcctccttcaggaaccagctcaaatgtctctgcctgcatggaactttccttcactccttccaggtgcaacctcctggctctgtgctccacatacattagcagactggaagggctttctcaggcttactgtttgcttctgccagaaaccccctgtggatcttgttagtgctcagccaggcctcctccacaggccctgctctgtgccccaggctccctgtagttagtgccattcatgtattcttcgggttgcctcttcccagccttattatgttgtggagcatagttttcctacttccatttatttcctttttggcctcaaagttaagcacaggccttttcatttgagtctcattgccaagcactggggaaagcaacacagggaagtcacagagtaaggtggcatacagtggaggtccctaggccataaaccctgactcctgatggtgtgaaaattagaagcccaatgggtttgtctgtttgtttcaagacagggtggtctcactccgtcgcccaggctagagtgcagtggcatgatcttggctcactgcaaccttcacctcccgggttcaagggattctcctgcttcagcctcccgggtagctgggattacaggcacccaccaccacgcccggctaatttttgtatttttagtacaggtggggtttcaccatgttggccaggctggtctcaaactcctgacctcaagtgatccgcacacatcggtctcccaaagttctgggattataggtgtgagccactgcccccagcccccagtgggtttctgaccttggctttagtttcttgaggctgccttctccctaactctgccttagcaaaagccatctggaccttttcctctagatggtccctcctctcagtctggcatgaaatccaagggaatgctggagaaacttccggggtgacattcgattcaccatctctctgcagagattcataccttatctatccctgtgtccccagagctgagcccagtccttggcacttgagtgcatctggccaaatgatcacatgcccagatagctctctttgggtttgtgttgtgtgctttgcagggagctcctggcaggagtgtggcattcactccttagtgtatcactgtgaccgtggggagcacagcatagtagttaagagtatatgtgctataacccaagagatctgagtgtgaactccagtcctcccacttactactgatatagtttaagaatgacaccagccatgcaaggtggcgaacacctgtaatcccagctattcgggaggctgaggcaggagaatcgcttgaacccaggaggcagaggttacagtgagctgagattgtgccactgcacttcagtctgggtgacagactgagactccatctcaaaaaaaaaaaaaaaaaaaaaaaaaaaagaatgacaccatctgcaaaaggggaaaatgttaccaccgactcccagaaactgtaactccccctgagcacactgcccagaggtagtgaatttgcagcagttaatttcttaggcaccacagtaatgtgatggttgttaagaccatgatgataaaagcatacaggctgggcatggtggctcacacctgtaatcccagcactttgggaggctgaggcaggagaatcgcttgagcacaggagttcgagaccagactgggcaacatggtgaaatgcatctctggaaaacaaaacaaaacataataaaaattagtcaggtgttgtcatgcacgcttgtagtcctagctactcaggagcctgaggtgggaagatcgcttgagcctgggagacggaggctgcagtgagccatgattgcgccactgtactccaacctaggcaacagggtgaaaccctgtctcaaaaaaaaaaaaaaaaatgcgtataggaaacagtgggaaaggaagacctcaaggtagaagtgaaggtgggcacatgtgaaggcccctggctcccagcagcccaaaagggctcctccctcaagcctcctcttgctgagactggagcctcaccaagctctgcccacttcagatggcagtgctgaggagtcaattacatcaatgacttaagtaaagcacttattagcacggtgtcttgcaccttgtaaacactaagtgatggctgtggatattgtgattaacattcttatttcagtgttgggtggctgggggtgaagggctgtgtctggaccaggcattcaggtgaaagagtggcttagtacatagccccactaatgcaaagagcataacatagaggttaaaagttcagactctagagcctaagaacctgaacttgaatcctgctttatcgtgtaatagctgcataatcttgggcttcactttcttctgtaacatggggatgcgttgtagagtcatctgaggactgcatgagtgcataactggatgagaggcacctggggcggcatggcagccagcactcaccacggttagctactgttatgctggagaagtgaggtattaggaagctcttgggtactccctggactaaagatttggggaaaaggattaaactcaggttgtggaacttgacttctcaggtggactggcgaccagggatggggaccatgcccttcagaaatatgggctcaaggccaggtatggcagctcacacctgtaatcccaggacttgagaggccaaggcaggaggattgcttgaggccaggagtttgagaccagcctgcaacataagactccgtctcttcctcccaaaaaaagaaaaagaaacaaagaaagaaatatgggctcaaagctatgaaatgagctcctccagtgttagaatttctctggtttcttcactggatggaaggggtggccattctcacacctgagaccccatcatctgcagacattttgccagggggctgcatgctacgccccacccccacgagttgcctcacacactcacaagtgggttggctcctggagtgcagtgagaagccaccgagaggtcaggcagggtgggaatggagcagtatgggcatctgggatgcctgcaggagcacagcttttcgtagcttcatgactgcatgggccttagcttctcagcccacattttaccaggtatacatgttcccctggggggtgccctggatgacccttctgaagccctgagcatgtgggaggctgtgcccacatggccagcattcttctgcggaatgagagcacaagcctccagcgttgcttgtcaggtttattgggtgcggattgggtcgcatgctgtctatcaacagggcctaaggttgggagcagggaatggctgagagctctgagggctctggagttgaggggccatgctggggccatgtgggaagagcctgactcccttccatttcggacagtttccatgtgggttatttggggatggtgcactttgctgtcatcaccaagcatttccagagtacctgcggtgtgtaaacccccttgctgagtgttcttactctctcctgccttggtcaggggctgggagctccagctatgcagtgctgtcagtagtctcggaaagtacacaagaaggccgccctgtagcacccccacaacatataccaaagcccccaaccccaaattaggaattctgtgttgagcccctgtttttcaggggattaactgtgctccagtatgggcaggagctgagcatctgtttgggtttttgtgtataagcccttgaacattcccaaaagtatgtttccagagatgttaacctaagggggtgaggttatacttgcactccatcctcacttgtcattttcttctcccttctccaaccccatttctgggtcacagtttccccagaagtctcttataacttggaggggtgaatggaagggttcccttagaactcatccagcacaggccagtggagacagccaatgtttcaccagagtgggggctttgaagtagcggaagcaggtatgggatgggctgggaagggtcagagctgggataaccaaaaaagagggttgctggcaggtgctgagacctagtccctgagccactgccagaacaggagttgaagaacttcagtctgagaatggctaagaaaggggctgctggccttttgggggaggctgcagtgattctgtggctggcctgaaggaatgctgttggctgaagcggtagctcttcagcagcggggaggcctgctctatggtggggggcatgccctcaacaccctctgctacatacactttgatgtgaacttgtcccctggtcggccacgtcccctaagttgtgagggcaagactgtttctcatgtagcactgtgtccctcatacagtgttgacagaagcctcttggtgaatggggccgtgaatggatgaacgagcaaggcccgcagcaggattcttggtggaatggcttgagaggacagactcctggcacccacagggcccaacaagtgtagctccctacaagtgctagttgctattgttggtggggataatacctgtccctatcccactccaccctggcctctgtcaccataggactggggtgggtttgggggaggcttctcaaagcagcctcatcccttcccagcttgtagccctccaggcaggtctccagggcttaatacatggtcatttcattttccatggaaaagcacacaatgtagttccattctgggtaagaacaaatttcaccctgctaaacaataccaagatactaagcaaagggggcaggggctcagataggaggaggttggggccctactgcctgccctcgaggcttaatcacttctcagaaggacccagatttttacagcctatctcctattcaaggctttcttgtcatcgggatctaggtttgagtcctggttctaccacttacaacccagtgaggatccccagagggatcagtcccattgtacatatgagacaacaggttcagaggtgctaagtgtctcagccaaggtcacagagctagttaggggcagagctgggatttgcacataggccaactgtctaaagacccagtgggctcatatgccactatgggcagaacttttccggaacagcccccagttttcctggcagccgtaaagggaacctgtagttttctaggggcaatatcagttgttacaagatctgaatctttgatgtctaatgagctgggcctagcctcagtagaggactcctgctccacattccaccaagggaaacaggcattacggcccctacccaggacagctggtgccaggaatccaactttccccataggacaatggacctcccttaaacttgtctatatatttatttatttattttaaatagagacagagtctcactcactatgttgcccaggctagtcctgaacttctgggctcaagcagtcctcctgcctcagcctcccaaagtgacaggattacaggggtcagccactgtgcctggcccctccttaaacttcttttccagagactctagaatctttctttttggtggaaaacaataaaagatttggcactccacatggaatgcggcaggagactgcagtgggtgaactcccccggtcccttccagccctgggccctgctgcctgccctgccctgcacaccagccctgtaaggcatctgctgtcccaggggacctttgacaggccctccagcccatagtcagctcttccctgccctcccttgtaaagatagatgagactggcagctgcagtgcctggtatcaggaagtccctaggtggctggagggagtgggccagagccccagttcttggtgggacagcttcatgggaaatgcaggggaatgttcaggggctctgagacatggtggaggcgggtggggggactgatgcaggatgcggatggacaggtggtaaggagtttgtgcatgagagtgggactgggagatgtcacatatttccctggggctttcctggtaaatataactttggtcaaggagaaaccagcagtaggccacagcctaggccaaggtaaaaatgctgtcttctaatgagctccagatccacacagactgtagctttaatgtcctaggggactttagccaaggcctagaaaaagtctcctagaagcagagtttggagaccccatagatcctaccctcagccaggagctcgagctaggggcattccggatgcctccagatgaaaagactgcacaggtatcaccaggccacattgaggggacgtagcaagggtggcatcaaaccgtcggaactgccatcacctcggtcttgctttgggaaaggaacaaatacttctgaattcacggcagtggtatcacctgtgagggtgcagtcaatgctagtcagccctgccctccttggctctgccctctcctaggcgagtgcctggaaagtgacctctgcaagcacaggcagactcatcttccaacctcctgctggagccattctccccagggtctgtctgcagacttcctcccttgcagctacatgggtccaaatgactctgcagagagggagatgcctcctcctcaggtgatgggtcacaggaaggaagaaggtgacctcagtgggggacggtgtgggctggcaaggtatcagtgggctgtggttgccgaatgcagcacacagaggctctggcccttgctctcagcaagttctcattttaaactttctggatagacaaataatccttttcctctcatcttttgccaatggaggtggtgaaatgttctctcctctgtttaatcagataagacttctaaagaaagcagcatcagaagggccaaggtaagggagaaaatgctgtgctctgcccatctgaacctatcaaaggcattaaacttggatcctaacgcacgtggcagacacagagcaacatcatgtagccataaggcctggaggagatgggggcaaggagccgtttcttactctgagcccaatcactaggtacctcaatgtgtcacaggtcagtaccggctttcagaggtcatcctttccattcccctgcctccaaccagggactcccaaaccacccctgcgggcttcccctaaccctaatgcttttcgcaaagggaaaaaataactgttgctacctagttttctcatcaagaggcctgtggacctttactgcatggaagttctttgttatatctaacctaaattcctcctgctataagggatagacagttgagtaaggtctagcgacagaaacacaggcaaaaataacctctggaggtcaccgggatgtaccatcaattctggaagcaagaagaagttttcctagcctccctttcagattagcacgaaggaagcagctctgctatgtgccggctccgaggagctcagctcaacagaaatcccagccctgggaggactctgggctccttctccttttaaggcaacgtttgagtgctcagggctacacaagcggcaacaagctccagcccctctcattcctggctatttggaggaaactgatgattaatcaaccctttccctcccacccccagcctgtttttcattaggttctttttaaagtgttggcacacctcctcaagaacagacacttggcagatccttgccaactaggaccccagggtaggggaggtaactaggaaggagtggggagtagtcctggattaggataaaggggagaagtcaggatgtgcggtgtcagggaagaaagaaggttaaattgaggctgggcgtggtggctcacgcctgtaatcacagcactttgggaggccgaggcaggtggatcacctgaggtcaggagttcgggaccagcctgaccaacatggagaaaccccgtctctaccaaaaatacaaaattagctaggcatggtggcacatgcctgtaatcccagctacttgggaggctgaggcaggagaatcgcttgaactcagaaggcagaggttgcagtgagccgagattgcggcattgcactccagcctgggcaacaacagtgaaattccatctcaaagaaaaaaagaagaaaagaaaaggaaagaaagaaagaaggttaaattgagtcctggctaggggtgagagggaagggtctgaatgggagtcctagctctgaagggggctgcgtgaaaagaggaggctggtgggtgaggctctgtgggcagctgggcacttgagtactccagggatgctgggtgggccgagaggagctgctttggcccctgatggggaaggttagagatggttacattgacttggtggctgttagtgagacagtcaggtctgaaatccagcttttcccgaacttgctaggtgaagtcagttaactcatcatctctctggatccccagtttctctctgagtgaagcctacaagtggcgtgggaactctggaaagggaagctatgcagtgcacagtgggctctgagaactcctgaaatgtgcacattttgggaaaggaaggaagaggggagggcaggagtctttgccctggaggcctaatctctagaccatgggcctagagaggctggtccctccagctctcacctccaagctccaaaagtggacagaatcagtgatggaactgctctcaacttgatgggatcagggaataggagagggaatttcctggtcaaactatgggcagatcctaaaagggctgatccattgggtttccttgtttccattctatttgcatactcctctccttctgtccctttcaaatcaaggttcagtaaggtcaccatcacttctgctccagggtcaaacccagttgatctgagggtcaaacccagttccctgggggcctgagtgagtgggagggggagctctctgccccttgctccatcaccatagccccagtggggcctccagtgcagctggaccttggggcctgcagggcaggaggctagaacagatacattccaaggccctgtctcactaggccctgtgccccttggctgcttattgtgattctagcagaggagccaaggactctcgctgctaaaaaaacccaggggctggtccccaatggcatgtgtttgtggtgcaggtacaaaccgtttccataggactcacttttctttccattccctcggcgaagagcggaggttgaagaaatgctacttgggcccgagagtgcgacagagagctgctttcctttcttccctgccctctccccacaccccaacctggcactcttgaaagaaaactttttaaatattcaaaccatagtctcttcctcttgaaaaacctttaggggaggacatcacagcctccctttaagtcccagttgctctggggtcacagttggacagttaagtctaatgtctactctatgtctaatgtctaactctgccacttcctctgcttctctgatgaagacgagaagcaagtgctctcaaaacagggctcaggctcggtgcaaccttacggaggaagaaacagggatccatggaggtgtgggtggcttatgctgtgtataaaactcaagcccccagcctggcgcggcggctcacgcctgtaatcccagcactttgggaggccgaggtgggtggatcatgaggtcaggagttcgagaccagcctgaccaacatggtgaaaccctgtctctactaaaaatacaaaaattagctgggcatggtagtgtgcacctgtaatcccagctactcaggaggctgaggcaggagaatcacttgaacccgggaggcagaggttgccatgagtcaagattgcgccatcacactccaccctgggtgacagagcaagattctgtcaaaaacaaacaaacaaacaaaccaaaaaaaacctcaagcccccatcacagctcaactgacttggtcccatggcctctctcacaaacttctcagtgtctcgggggtcaaaattgagtcatagaatccaagatctagaatctggcagagtcttccagagatcagctgacccaatgaattccagggctctccacagagagatgcttgtccttagctaagtttttactaaaaataaggacaatactgtgaatttaaaaaaatacacatatttgctgttaaggtatattctttactctgttatgcctaccttctttaaaattagctccttcttattttaatgagatgatgatggtagatagaattttaaaatatcggatgggcatggcagctcacacctgtgatctcagcactttgggaggctgaggtgggaggactgcttgaggataggattttgagtccagcctgggcaacataacaagacccccatctctaaaaaaaaaaaataataataataacaataataatgataataatttacaaatatccttaattggtaaaataaaatgttagcatatgttgatccctctacctttttttcctttggaaatgtattgccttataaaatttctgtatctcagaactattggcctactccttaaaagcaggggccaggactaaggtgaagggatgtgaggcactcaccttgggcacagaatataagcggatgccaaaaactcagtgagcaagataactgatgttttcacatatatatatatatacacatatatatatgtgtatatatatatatacacatatatatgtatatatatatatatatacacacacacatatatatgtgtatatatatatatacatatatatatgtatatatatatatatatatacatatatatatgtatatatatatatatatatatacatatatatatatatatattttttttttgagacagagtttcgctcttgttgcttaggctggagtgcaatggtgcagtcttggctcaccacaacctccacctcccaggttcaggtgattctcctgcctctgcctcccgagtagctgggattacaggcatgcaccaccatgcctggctaattttgtattttagtagacacaggtttctccatgttggccaggctggtctcaaactcccgacctcaggtgatccacctgcctcagcctcccaaagtgttgggattacaggcatgagccaccgcgcccggacttcatgtatatttttaaaaataaaacgaatgcaaaaagtccacaataaacaccaatgcaaaattttaaagacaggatcagtgttagtatttctccttttgcctcaggttccaatgtgcttggcagggcattgcttggaagcagtccttctaaatcacccatgataggaaagggcaattctgggtctgagaatactccataaaaggaactgccacaacctttgcaggtatttgtttggttgtctcacaaccctgaggccttgagtctgatgtcatcccatttctgcagcttaaacctgagtccctcttttgctgccctcaatggagacatccaccccactctcccaaacagcacaactgtccttcagaggctcaagggcagttatgtaagcgctcccccacacatccccatactcattcctctccctctgtagccagcttttcatgattatttttcttttctgaattcttaggaaagcaagcaagtggagaccaagacagatgccaagaatggagaggaaaggggcagagatgccagcaaaaaagccctgggccccagacgggactcagatctggggaaggagccaaagaggggtggtttaaagaaaagcttctctagagacagagatgaagctggtggcaagagtggcgagaagcccaaggaggagaagatcatccggggcattgacaagggccgggtcagggctgcagtggataagaaggaggcagggaaggatgggagaggagaggagagggcagtggccaccaagaaggaagaggagaagaaagggagtgacaggaacacaggcttgagcagggacaaggataaaaagagagaggagatgaaggaggtggccaagaaagaggatgatgagaaggtaaaaggggagcgtaggaacacagacaccagaaaagagggtgagaagatgaaaagagcaggtgggaacacagacatgaaaaaggaggatgagaaggtaaaaagaggaactgggaacacagacaccaaaaaggacgatgaaaaagtcaagaagaatgaacccttacatgaaaaggaagccaaggatgacagcaagaccaaaacacccgagaaacagacgcccagtggccccaccaagccctctgaaggaccggccaaggtggaggaggaggcagctcccagcatatttgatgagcctctggagagagtgaagaacaatgaccccgagatgactgaggtgaacgtcaacaactcagactgcatcacaaatgagatcttggtccggtttactgaggctctggagttcaacactgtggttaagctgttcgccttggccaacacgcgagccgatgaccacgtggcctttgccattgccatcatgctcaaggccaacaagaccatcaccagcctcaacctggactccaaccacatcacaggcaaaggcatcctggccatcttccgggccctcctccagaacaacacgctgaccgagctccgcttccacaaccagcgacacatctgtggaggcaagacggagatggagatcgccaagctgctgaaggagaatactaccctgctcaagctgggctaccattttgagctggccgggccccgaatgactgtcaccaatctgctcagccgcaacatggacaagcagagacaaaagcggctgcaggagcaaaggcaggcacaggaagccaagggagagaagaaggatctgctggaggtacccaaggccggggccgtggctaagggctccccaaaaccttcacctcaaccatctccaaagccctctccaaagaactcacccaaaaaagggggtgctccagctgccccaccaccccctccccctcccttggctccaccccttatcatggagaacctgaagaattcactctcaccagctacccagaggaagatgggagacaaagtcctccctgcccaggagaagaactcccgtgaccagctattggctgccatccgctccagcaacctcaagcagctcaagaagttaagtagttgtgggcatgagccaacagggcggggctgggtagggcctggaggagagggtaggactgcaaaagggaaggcatgcagaggagcttatgtcggctgcagatgatatagactcccagggcccataggggacttcaggtcatctcatgcatcctcctgcctgcaggcaggtcacacctgtatatcccctagagctgagactctacccttcctttaaggagcttcctttaatacctcactccatgcttctctttcattctgcaatgaagcctgtttctccttaaaatggagaaatggcctctacagagtagttttgcctcgggtccttcctttaagtcttctccatttccccaaacaaaaatgatccacgttttacttagcctcctctcaggaccagccaagtcctacaggtcagtccatccgaaaggtctctgggagattcacctctcaggagagtctacctttgcctagccagtgccatggacacaggagccatccctggacaccctacttctccaagccctgcctcccctggaagtctggcctgggtgacaaagtccacgatcgtttgtccatttggttggatacccaacccccacaacatcatctgggacaaggtatcatgagataaaggaaaatctcaattgtaattccagtggtcactcaatgacatccaatttttacagacaatgaaaaatgctccctcagtgtcaacacctcattcacattccacagacataacatattgcagtgtcttgtgtgtccttccagtagggagggaggtgaggtggctgagctcccttctctaacctgtctctactttgcccctacaggtggaagtgcccaaactgcttcagtaggaccaggctgccaggcaccatctgccaatgccatgactgctcaggcctcacctcccagggctacacagaccctgcccaccccatccctggctgacctgctgtggatgtccctattctgccatgggagagtccaggcctgggtcacgctcaaggaaggatgccttatctcttctcactttccttttcttgtctctgaggctctccaaattttgctttagtacatggagctcaggtttctggacaagaagagtccttttagcacatcactgagaagatggcactgtccagggcccatgtagctggcaagctgcaaaaggcctgtgatccaggaaagatgtcccacagggaccacatccaccccagccccactgccctccagggccaggattcaggcctctgaggagcccacggggcaaagctgctgggccagtggcactctgtgtgggaaaatggcagaaagatggagaggcatgggggcccaaaggggagcgtggggaggggctgaggataccccaaagtccaggctaattagaggatgtggcaggggcagtggcctggatgcacagtgcctgatgggagtaggctccagacaggaggagtgggacagacagcagctggacttgaaggtttgatgccaaagcagacattttcctcacacccacctgctgctgtatgaatagctgtgtatctgtttttccataagattttgataatatatacaaacctttagctgtgaatggctgtgccccacctgttgtcctgaactgtgagtcctgatcctaaccctgggctccctggaggactctagaagctcaggttccctgccacactatttgagttggccaagaaataaattcacatcctcagaaagtgcagcatggaggaaaatctgaactctaagcagaagactctccactgacctggttgtccaggtctagaaggccaggcctctactaggtctgctcctgaaccagtcctgctgcctggagtcagtagccagagttgttctcaggggtgctggggcagagtggagcccagggtgctgggatggctatattaggcatgttcagggatgctcattccatgactctgcctaaccatgggctcagggccaggtcctcacagcagtcacaggcccaggaaggcggcaggcagagaagtggagtgactatttggagaatagcacccatatctgtgtgccctagggctcagaggggcctcatcttccccagccctccccacctgctcaccaattccacttcctgccccaactgcaggaatgctgacaatgctgccatgcccaccatcgggtgtaggtgaaaggcatctttctgaatttcattctcttgaaggtgctgccaccccttggcactgtggaactgccaccttgggtctgtgtcacttgtaggtttctctgcctccaggttgcctcaacagcaggaggcacagcagtttcaccatctttgaggtgagggtggggtgccccagctaggaagcaagatcgctgtgctaggtctgaccaaaaccagagggcagtctagtcctgggggtaaagccctcagatcccagggtacactcttctccattccctccacccacttgcctgtcaccccagtcacctaagcaatcactgggcccagaggagaggagacagacacacactggctcctggacctaaagggtatgagctggagctaaggccagctagagcttccactgtcagccctcactgtcagtcccactgcacccccctgtgcctgctgggcactgggcactagctagatgctttaggttgcttcagctgatccttcaactctgtgaggtggataccaatattctattttgcagatagaatttggcccagagaggttaactaatatatccatgatcacacagctaataaaagtcagagctcaggtc

SEQ ID NO: 106 - DNA, 75733 bp, Homo sapiens
cggggcggggacagcccggcgggtctctcctcccccgcgccccgggcctccagaggggcgggaggggaccgtcccatataagccccggctcccggcgctcggacgcccgcgccggctgtgctgcacagggggaggagagggaaccccaggcgcgagcgggaagaggggacctgcagccacaacttctctggtcctctgcatcccttctgtccctccacccgtccccttccccaccctctggcccccaccttcttggaggcgacaacccccgggaggcattagaagggatttttcccgcaggttgcgaagggaagcaaacttggtggcaacttgcctcccggtgcgggcgtctctcccccaccgtctcaacatgcttaggggtccggggcccgggctgctgctgctggccgtccagtgcctggggacagcggtgccctccacgggagcctcgaagagcaagaggcaggctcagcaaatggttcagccccagtccccggtggctgtcagtcaaagcaagcgtgagtactgaccgcgggctgaaacaggctgcctcagggatgggaccctaaagccgaccaaagttggggctgaagttttgtgcgcgcgcgtgtgtgcgagtgtgtgcgcgctttactgagagaaaccagctgtgcacacaaaaggaccgagttttgagcacgctggttctgagggcctgggatgataagaccgtgcattggaggacgaggactctgcgactttcccgtgttctaataaattctgcacgttcagattgtccttctaggaattaaccaaaacttgcctttaaagagaaaaatgatgcatgtctataaattttccgtctgggattagtgtggtccttactgctacttatttccttctgttaaataattggtcaaatattttcaacatgggggtggaaagggggtattgaaatagctgtcttgtttctaactaacttggaagagatgtaattggttcagacctctttagggccgctcaggatacttcaccaagaacagaggttggaattctttccgtttttcaaagacacaccctccttttgctttgagaaagctgcttaaagttgtcctttttgactattactccaaaagaatatttaagttccttgcatgttttaaaaatgtgacttcaattgtctgccttccaaaatgtttccaacttttttatgtagacccctggccagatggaaatgacatcattgtatataacttttagcaaagttaaaaggaaaaaaatatgtacgtcaatattcacatgaagaaaattccataattttgggaaaaggagaaatgcaaatgtaacgttttccttcaattatttgcagccggttgttatgacaatggaaaacactatcagataaatcaacagtgggagcggacctacctaggcaatgcgttggtttgtacttgttatggaggaagccgaggttttaactgcgagagtaaacctgaaggtaagtgacaacaagccccatagttagtatcttttaatacatgaagtggtaattgttaaactttgcattagtaagtaaaaatacatacaccatttttctaatagaattacctgtcatttcctcttaagtttaaaaactgcttatatttgcttttcacatgcttttacctttaaaacaaagaaacgaatctttcccaaattagttcctagagtcttctttttgctttactctcccaaagtttttgatgagaaaaatgaaagattttgtgtgtcctccgacaaaaaaaattgcttataaaattttaatttattagaaagcagtctcaaatcttaaactgttagtttatgagccagaaaacactttggggacttacatcgtaaaatgatttgtcagcggcagttaacacaaaaccattagccacttcaaagttctcattcctttaggaccaatgatatttttctcataaattatagcaactctgtcagagaagcactgatcaggggaaaatggaaatcataggattaacaactgtcaaggccttgtgggaggtggggatcttcgaattgtttgtttgtttttgttttgttttgtttttgagacagagtcttgctctgtcaccaggctggagtgcagtagcactatctcagctcactgcaacctctgcctccagggttcaagcaattctcctgcctcagcctcctgagtagctgggactacaggcacatgccaccacacccagctaattttcatatttttagtagagacggggtttcaccgtattggtcagggtggtctcgaattcctgacctcaggtgatccacccgcctcagcctcccaaagtgctgggattacaggcgtgagccactgtgcccggccaatcgtttgctttttatgtgaaccttgctttgactttctgagtcagagattggaatgtgaaacccttcacaaatctagctctgtcataagttagtactttatatggccttttcctaagagcctgagatttttctacaatatgaataatttacagaaaatttgacaatatgtcaaggtcaaaaaccatggccttattagagcttaggataaaaatctgtatctctcacttcattttattctttgaggtgtaccatgttacttgtggaatagagaagtgggttttcctttagaggggattagtgaactagaaaagcttgtacctaagtgaggctcacatggactttccttttcccctcagctgaagagacttgctttgacaagtacactgggaacacttaccgagtgggtgacacttatgagcgtcctaaagactccatgatctgggactgtacctgcatcggggctgggcgagggagaataagctgtaccatcgcaagtaaggaagagattgtgtaaaatgatgccaaaatatcaaatatgaatttctctgttaccatcactgtcattttctgttatccatgactggatattccgaactttgaggtttgcccctggtgaccaggtactcttaagtggtcacccaactggttcctgtgtttcttaaagacgggtatgagcacagatggaatcagtgtttgatgtgtgtgcgtttatgagtgtgtgtgcatttatgagtgtgtgtgtttctgtacatagtagaaccaagagacctcttgggttccatttcagtaagacatgcttaggggagttgcccattttaaatcacctggatatcttcaagctagacaaatcatgagacttttctgcagtgactgggaaggtgttcatgaagagtgaaccagccatgtgttgtctggtcttcatgtttgcaatgcagagacctcttgcacctcacagaaacagtctggtttcttggtgaccagtaggttatacccaggaagcagatgtcactattcctagggataatacaaaattattaacccaatagagtttgctaaggaactttgggaaccgggctgattctcaactctagtttagctaaggcactctttccagtatgattcactgggttaccaatagattctattaagatagtatttaagttttttaatccattctttaaatataagtcgtcttaaagacttctattcaaaagaacaagtcccgtgtgaataggcccaatcaactttccccatatttcatgttagggtttatccaagttcacaggcaaatcgcaagaggcaagggtccatagtgtttacaatctagttcagcatttgaatgtgccattgggcttaacaacttagaaaactaccaggatttccacactttatatgcatatgtctgtttgctttccaccaaaatgacatttctatcctagggtaaaatacaggctctccatgctcccaaaagctggagtgctgtgcctgatgtggccttttcactgaattagtctcagtcttagcctgctgtgtatgagtgaagaccaagcctcccagcctttcttttctgcttaggacccaatttcctgtgatctctctgggaaagcaggattcatgacctcttccttgccatccagatttctctgtggttttccattgtgttctaagcaagacacttaactgaattgactccaagtgaccagacctgttaacgtttcccctgtctctgatgggaaagctgttgtctgtgtctctactttagccaacctaagtacctaccatgggtggaatatgagaccaaaaaaaaaaatctgttctgccctctcctaacattttcgttgtatcttcaacagaccgctgccatgaagggggtcagtcctacaagattggtgacacctggaggagaccacatgagactggtggttacatgttagagtgtgtgtgtcttggtaatggaaaaggagaatggacctgcaagcccataggtgtgtgagtcttagggctgagcaagagctgggatgcttagttctaatgtggggttggaccagaatcacatctacataggtcatagacctgaattccagtgaaaaccaataaagaaatgggaattttgtttgaaataatgaattattatataatccatagtcttcttacaggagttagatcaaaaagtactgactacacatagaagtcttaactttgcttcaaaagcataaggtagaattgaaagatttagaatggagtcatttcttttacctaatagctgatctcagattcctccttcgtcaagatataatttatttaaaagaaaaaaaaatgacactttggacacatttctatatggaatgtcctggaccgaaacatgaaatagtgtgtgcttgtcacactctgctcatttcttttcaaattaaaagttgttgagcttctttggatctcaatcctcagttgaattttgtaagtacaagcctgaaagtttctggctataaattttactctgtttacttgtcttctaatttagaggtttttgtcttgttttgtattgttttgctttccaatatttaaaaatagctttctttgtcattgtatttaggccactcaaaattcataattggtcatttataattaagattggaattttgcatatgtagtctcccacagactagatacatacatagatccttgctactggaaatgctgctgggaagtttggggctcgctgaaaatatgtagtccatgtacttattaggagaatggaatttctgcctgccaactcagcttgagctttcttttgccttggctacttactgtgtgcttagatgctgggtgtgtcattctttctgaacagagtgccacttaaaaaaaatgtggctgaatttttgcttacacactacactttaaattacagggagcttgcacaattcaaaataacctttttttcctgtttttcttccaaatttccctacagctgagaagtgttttgatcatgctgctgggacttcctatgtggtcggagaaacgtgggagaagccctaccaaggctggatgatggtagattgtacttgcctgggagaaggcagcggacgcatcacttgcacttctagaagtatgttttacatctttatgttaaagattaagccaggtattgttttctggattcctagagagaagggtaatactatgttactcagaacacatccagtatatcagcatgctttggtaacttctggaagtcaagaaaactttcataaccaacttattccgcatcttcagagaagactacataaatagaaaaacatatcactttgataaggttcaatctcagctcactgccactgacatagagttgaacaaaaggtttaggtttccttctatgtttgaaatttaaatagggcacattcacaggctaaattgataaaattaaaaagaatttatcccataaattaaaatgatttatctactctggagttagggatagtgtctctgacctaacgcatttgattagtgctgtaaagaagctggcctctggtgtctttactgctccttctaagattgtcttggggtcttaattgttgcctttgggtttgaaggctccttttttgatattgtaaactaataacagctagagagtttgttgaagtaaaacagccattaactactggtgttgtaaataagtttaaaatcaaatccaaataatttgaacctgttttatttatctagctgaacccatttaactacctttaacatagccatcatccaaattcaaattctttgctaacaaaaataggtctctcatgaaaagtggtaaccattttgaccaaagctttcccagaaacttgctggtttattagatattttgcatttaaaatgttactgtgatcatcagacttccaagatctttgtggcaatattttagcttaagacaaattagatgtctgattcaaaccttatctgttatttagaactctttaaatagcaagttgggaaaagtttctcaaagagaagtcatttattccagaaaattttataaggacttactttgttcaaggtattataggggtgcagatatgaaatgaacattagcccagccttcaaagagtacttagggggtcagggagatgagaaagtcttatacatatttatcatctgcaaaacacagtattaaagatttcaacagaaatactgaaagtagtgctatggaggttcaggggatgataatacttttcgctggggatttgggaaaaagctctaatcagtaattataccttcatgcaaacttctattcttgtggtagatggatgtgggtgtgtatttgtttgaacctacatcaactattaattttttttctctaacccaggagttgcaacaatatccaattcacaaagacatcagatcctctatactcacatcgtggcacagagcaaatttggattataatttaaataatctatttaccagataaatgcacgcatagactaatggtcatttagttacaaattatcattttatgttgatcccactcttccagtggagggctaacactgaataatttggggctattttgctagtgatttttaaatactgtagatgtttgggtataggggaagggaaaataatattttagtcaaagaaattgtgcatcctctacattttttacataacaaatgaagaaagagatactaccaccttcttatagcttctttgtagccattggtgaagaccctttgatacctgcttgcctccccattgttataagcttttttttgtttgcttgttttttttgttttgttttgttttgttttgtttttgagacagtctcaccctgtcgcccaggctggagtgcaatggtgtgatctcagctcattgcaacctccacctcccgggttcaagcgattctcttgcctcagcttcccgagtagcttggattacaggcgcccgccaccacagccggctaattttttttggtatttttagtagagacgggggtttcaccatgttgcccaggctggtcttgaactcctgactgcaggtgatccaccctcctaaagtactaggattacaggcgtgagccaccgcgcttagcctgtttttagttttctaaagcaaggtccctattgaaaggcaggccataaacagtgatgactaagaaaaatcctggaagagcctgagaaggaaaaagatgaaatataatgccagagaatgaagttagtcaaaggaacagtgtgaaaacaataaataaatagataaatgaaaatgttatttgacagagagatgaaactagactaaaccattcagctgcctttccactgtaacaaatgtaatttcatctttcagaagtgtaataccttgcagcaccagagctgaatatgaacatattaccaaaaatagattaccaggcatagatagcattccttttttaagtttgaattgaccacttgcgactctcgacctgatgtatgtatgtgcttcctttgtgacacagatagatgcaacgatcaggacacaaggacatcctatagaattggagacacctggagcaagaaggataatcgaggaaacctgctccagtgcatctgcacaggcaacggccgaggagagtggaagtgtgagaggcacacctctgtgcagaccacatcgagcggtgaggcacaggacgagcaggggcgggaaatggggaagcaggtcaagaaatatttccgcaaatccatctttcctttgacatgccatttgaggataatttgcagtgtttcagctaataacctaagataatttacacattattggttgttaaaactttttttaatgtcaagttttaaatttttcagaaaaaaagaaaaatgacatacaaataaaccttagggggaaaaaagccagatttatctccaaaagataaaactgagttttaaagaatgctagcatcataaaacttaccatggatagatcacgcacacacgcacacacacacgtattttgaatatccaaagttcatttgaaaggaaatgagagttataattaattatatgactacctggttcttctgctaggaaaggacaaaaaaagtgcatttggattttttgtttgtttgtttttgaatgaaatatacttccctgtcccgacattgaactctttttgtagtggaaaccatcctttatatgtggtttctatgctctggcaaactttgttacattctataaagtaacacacaattatttccttcatgtattggcattcgaaattttagaaattcagagaggacttagagatggccatgaaagacatgatatctaagcattctttttaaaaaacaagttttaatcatttttggcatgagaaaaagatttttacgtcataaatgtttcataaaaatctgaagagagaaatatggccaacaaggacgtgcactcctctcattatttttaatatgttttgattaactttttactatatgatgtgccaacatcattacgtagtgtctcagccatccttcaattaaaaatattaattgttctaatttttcttcttttgatgagtttttgtcttgctttgagcacttatgaaggtgaacaagattagatttgataatatctttgagttattttattatcattaataaaattgctactggccaaaaaaaattataaacatcggccacgcgcggtggctcacgcctgtaatcccagcactttgggaggccgaggcaggcggatcacgaggtcaggagatcaagaccatcctggctaacacggtgaaaccccatctctactaaaaatacaaaaaattaaccaggcgttgtggcgggcgcctgtagtcccagctactcgggaggctgaggcaggagaatggcatgaacccgggaggtggagtttgcagtgacccgagatcgcaccactgcactccagcctgggtgatacagcgagaccccatctcaaaaaaataaaataaaataaaaaataaaaaaaattataaatgtcagtctaccaaaatagattaaaagtgtaggtgggaattaaatggggataaacactcaataaatgttagctatatatgaatattgccaatactgaaaagattccattgttcaaaaaagtttgagaagcaatgggttaaacaaaatggaacctgctctgcagaatctgtgtgttcctttacatcatactctccatggtagagtgtaggggatgggcgccatgtctccctagtacgtttgaccttgggattctttgtctgtgaacatctttgggttctagtgttcagcagcacttagggaggcactgaattcagtgtacctttggtctagcctcagccctgattctgttctgcggtgggccctggccttcaagagaacagatatctaaaagttgaaagaaaagatcggccgggcgcggtggctcacgcctgtaatcccagcactttgggaggccaaggcgggtggatcacaaggtcaggagatcgagaccatcctggctaacacggtgaaaccccgtctctactaaaaatacaaaaaattagccgggcgtggtggcgggtgcctgtagtcccagctactcgggaggctgaggcaggagaatggcgtgaacccgggaggcagagcttgcagtgagccgagattgcgccactgcactccagcctgggtgacagagtgagactccgtctcaaaaaaaaaaaaaaaaaaaaaaagaaaaaagaaaagatcaacacatcctgttgtgttattctgaaaggaaagctgtcttaagaggatcaattggttttagaaaaaacacaatagaatcacaaataatccagaggagaaataaaatgtggaaggtggaggtgacctccagaaaatccaggacagctgctgaaggcaccctctgatgagctcggttactcagaagagtgaggatgtgttgaaggtatctgctgtatggagtggcaggatgatgtctgtgattgagaaatataatcccggccaggcgaggtggctcatgcctgtaatcccagcactttgggaggccgaagcgggtggatcccctgaggtcaggagtttgagacaggagtttgaggtcaggagtttgccaacatggcaaaaccccgtctctactaaaaaatacaaaaaaaatcagctgggcatggtggtgcgtgcctgtaattgcagctacttgggaggttgaggcaggagaatagcttgaacccaggaggcagaggttgcagtgagccgagaccgcgccactgcactccagcctgggcaacagagtgagaccccatctcaaaaacaacccaaaaaaccaaaaaacaaacaaacaaaaagaaatataatcccagtagccccagctgagctggaggatggagaccacttggtagacacttgtggattatttcctaggctaaatgcaaaagctactgctgaataagggacatttttttccagtcccaggccagtagcgacatagatttcagagtgatctctgtgagatcctgaagatcctgactgcagaaagtagtgaattgtcttctctcacccagttttgtgacattcccttttcatgccattaggatctggccccttcaccgatgttcgtgcagctgtttaccaaccgcagcctcacccccagcctcctccctatggccactgtgtcacagacagtggtgtggtctactctgtggggatgcagtggctgaagacacaaggaaataagcaaatgctttgcacgtgcctgggcaacggagtcagctgccaagagacaggtatgcattatctttttgaagaataggactgatgactttattatttagtttttgaaggacaatacattttcaatgtgaaacaataaaacaaacaagaagcctgtaatcttaccaccctgtgataacaattagggttggcatttgaaatagtttcttccaatctttttaatttatgtattttctttctggtcatggatatcatgggtaaaaattttattgtatttatctgtctaaagtgttgttacaagagagctactttctgaataatcatcaatgttttatattctaaatctcaaatttcagcagctttgtgatgtaaacatcttccaataacctaatatatgtattctgcactacaaacatggtagtcactatggcaataacaattgctacacaattctcccccagaatagtctcatatattaattttatggcatagatatagtcataaatattatcccaacatccttaagcagcatccttaattgacctgtataaatatagctttacaaatagagaaactgaggcatggcagcagaagtggtcatgaaggacatcagcagaagaactcaggtgtcgttctatccacagtagacatggattcctgagtaatgcattttgactgaaattaacgagatgatcatctatactcatagcttcttcctttgagggcacaagctcagtatctcattgaagccataaataagcagctgctggtgggagataaagcatctctgtttactgacactcttttgattatgattgtagctgtaacccagacttacggtggcaactcaaatggagagccatgtgtcttaccattcacctacaatggcaggacgttctactcctgcaccacagaagggcgacaggacggacatctttggtgcagcacaacttcgaattatgagcaggaccagaaatactctttctgcacagaccacactggtgagtgtcccaagggggagccacagaagtgagaaaaactcactttcatgccctagttttatttgccagcattctagccatttattttgaacccgcccaagaagcatcgcttttgttcagtttggactcaagagatcgcagcgctcacgtaacagctgaggattcttccatcttccccagtactgttgggaaatgacaccaagggagtagccttccagttcatttgatttaacacattgggattatgatgtgattaaagatacttgtattttggaatcagtagatgatcccacagggctgaggaatacaaaggatgaatgttttagtgccttagcttattttccagttaaaacaatgttttattcaaagctatcatttaatcttttgtggggggggtgctggggaaatgacagtgaaagtgggatttaaacctgttttgaaggtgtgaaggtaaatatgctaagaagcttagaactatattatcagacattttttattctgagatagactgtctgtgaatgagctgcagaaacctggctctctcagaccagtaattctgtgtacattggaaagctcagcggtaatcttttccttctttgttgtgtattgttcctggcagttttggttcagactcgaggaggaaattccaatggtgccttgtgccacttccccttcctatacaacaaccacaattacactgattgcacttctgagggcagaagagacaacatgaagtggtgtgggaccacacagaactatgatgccgaccagaagtttgggttctgccccatggctggtaagatgaagcccttgtgggttgtcttgtttgacaacaatttagggagtagagactaaagactagtgtccagtttactcccatttcattcattaacacaattttgagacaacagaaaacttcatgtgaagtgtgtttgtgtgtgtgtgtgtgtgtgtgtgtgtgtgtgatgttacatcatatacataaggattgggaagaataattagataattatttatataatttttaaacctcattgacatgatttaatgtcaaaaatataattacttatttgtaagtctggaaatatgaatttgcacaggtttgtctttgtaaagagcacacaactgagtagcttacaacatttaatatatgtatgacggctttagtcacagagctacaatattgacacatggttgtggtttgatgggcataagctctatcacttattaataagtgccaaagtgactaaaactcaatgttttctaacaggtagggaatctcactctttttttaaaggtccccagtttgtatagatggcgaacaaatggaaacgaataccttttacttgttttcagatttcaagaaccccatagattccctttaattttccagttgtagaaacaagagcctgggcggtaggcactgtcaagtgtgactatgagacaaagaaattgcttatacttttatttctttcaacaaaagaagatgctgagtttagaagaaaaaacccacttttgcttgtaattctatatccaaacccatagtttttatttgatccagaataaactggaactgggaaaagttatgaagctgtagttaaatccaggcttctagaacagcaagaaccctttgtgtggatgtgtagatattatcttagtttaacatcccctaacccttcctgtaactattttctatgacacgtttggactacgttttctgcctccagggctcaaaaattctaccccttcacctgacagcacttagatgtctttgatgcacacaaagcttcttcccaagtgagaattcttaggatgaccaaactgaactgatccttttgcacacatacatgtttagacctggtgatcatttatcaagtgcatttcttatccatttccaaacagcccacgaggaaatctgcacaaccaatgaaggggtcatgtaccgcattggagatcagtgggataagcagcatgacatgggtcacatgatgaggtgcacgtgtgttgggaatggtcgtggggaatggacatgcattgcctactcgcagcttcgaggtatgctggctgattaacaaaaatatttgagatggcaaaaggtacagaaagggacacttttttttatgaaaacttgcactatgccaaaagcaggggaagaaatatggaatgccacgtcattcattagtctactgtgcatggtaagataagcctgaaaggcttagcaggcagcctgctaagacaagcggcatagcaatgctaatgttctgaaacactcctagcatgtaagtacttaggctgagccaaaaagatggcttcaaaagtaagaatgaaacatttgatccattcagctttaggctatgccactggattcatgtctagaaaagataggataatttctgtaaagaaatgaagaccttgctattctaaaatcagatccttacagatccagatttcaggaaacaaatacataggggactaactttccttgttcagattagtttttctcctttgcacccagctatataatatgaggaagtattgactttttaaaagtgttttagttttccatttctttgatatgaaaagtaatatttcgggagaaccctgagctattaataatctatgtggctagtgcgtagatattggtctgaatttgttctccttttgtggtgtccagtgggtaacaccatccgggagtaataattacatgtggtgttgcagaactgaaagagaccttaataacacatagagacctcactctatatagatcaaggagctgagacccaaaaaggaaaaagtaattttctcaggatctctcaaagagtgagcaacagagttggcctaatttattttagcgttgtgaatactgttgacattttatttcccaaatctaagtatctcctccccttccccctattccagagaccagaccaccacatcatgctgggtgttagataaatatgtttaatcttcttcttatttatcctaacaagcagatatttaaaggaaattatcaactaagcaagaaattttcagaaagtaagacatgtatttgttcaaatactggcttctcacaggaaagtgtattttaccacattctttacttgagcatactgtaacctctgcaaaagttacacattttgggaagaaaaaaatttttttggcaaaaattgtattactgaccaaactttgaaaaaaatgttattctatgcttgtagaaaagttattttagtggaaggtgttgataattaagtggaagtagttgtatgctttgagaagcataccttttttctttcatcaatggaactttaaaaagtttctcactcacccacctgtttcctaaacagatcagtgcattgttgatgacatcacttacaatgtgaacgacacattccacaagcgtcatgaagaggggcacatgctgaactgtacatgcttcggtcagggtcggggcaggtggaagtgtgatcccgtcggtgagtagccctatttccctagatgagtttgcacagggggaatggttagcaagtttcagataagaaaagctatgtgaaatcacatgactgaagttggctccagactttgatcagttgcttgcaaagaactttgcaaagtcttctctctaatactggaccaaaatatctcgatattggtagtcgtctggtttttgctgaatttggtgacaaatttaggcttattttaattgaatggaatttattcttgggtttagaatcataaagataatccatgctattaaaagtattctttccttttttttttgtttgtttttgtttttgtttttgtttttttgagagagagtttcgctcttgttgcccaggctggagtgtatggcacaatctcggctcactgcaacctctgcttcctgggttcaagcaattctgctgcctcagcctcctgagtagctgggattacaggcatgcgccaccaggcccagctaattttgtatctttagtagagatggggtttctccatgtgggtcaggctggtctcaaactcacttccttaccagctgtgtaacagcatgagcaaagggtgtaaatatcacccaccaaaacactctaggtttttttttggccgcccttcaaaatagaactaagcaaatagtgaaggctgagccttaaaagagctgtgttaccagcactacaaagtttaaggtgatccattactatttctttaccaaaagagacaggttgctcactgagaaaacaaactgataacatccgtttgtttgacgtgagattaccagaactgagagagaagcctgagaggttttcttagaagctgctcagcaggtatactcgtaaagtctagttcattcatttaaatgtcaaacagtttctttaaattttgaagaagtaaggaaaatgaaattattgcagatttttttcttgctatttaaatgttaagccagttatattaatatgggtaaaaataataactaatatttaaaattaatgtgtagattatcaatatacactgaaatctaaatctttacatttttatttagaaatattaccttttagaaaactaaatattcctcctaataggtactttggttttttttttactacaaactgtcctgtaaggtaaagaatgtgaacaaaatatttttttaactgcatatatttgtaagaacaattgcaaatttctatttaagctaaatgtatgctctagcaccctgaaattaaattcgtagttataagtcttcaaggctgtttatcttttccttccatgtattttagaccaatgccaggattcagagactgggacgttttatcaaattggagattcatgggagaagtatgtgcatggtgtcagataccagtgctactgctatggccgtggcattggggagtggcattgccaacctttacagacctatccaagtaagtagctctattactgcaagttgagaactgccaattgggttataacaacagggcagtgattattaatgctctcatgcctaagttgggggtctcccctctttcccacccttttctcttgttattatctaataatcaattgaatttttgattaaaataatttttctctcttcctctatcaagtaaaaggtagagaaggctatgaaaatgtgcctgtttataattttacttcttaactctgtaaaatattctgttaggttaagacactctggctaatttcatcttatatccatacatggaaataaaaaccaccaagtgagttatgctgggagtaaaggtttggggctttatattatgattcttaacagagaagctgcatagagagatggcatgaaatgcagcataaggtacgtgttcattcaacatgtcatctaagctccctttgcatcaaacttttcatttgtttgatcagttgccaccaggaacacagtatgttgggccaagggttgagtaacttggtcaactctctgcccacacagttcaaacactctcaaatgtttattgctgggtttttccaggtcacaaagacatcatgcctagctgtaggtgtaattagttcatttggggggaaaattgcatttaaatattcactgagtgattataataaaacatgttaataaaacatgaaaggctaattaaaaggcatcagttatttgagcaactgctgaggtgcaaagtctccaaagtcttcactaacgtttgactgaaaatatggcctacattcagaaacaaaagagtttcagggtgtcagaatctgcatgcgacagaaattaagattaactctgtgataaaagattcactgtgacagagaacaagctatgggaacaacttggccaaaggtagtgttagccaagcctcattcctccatttcctcatctgtaatatgggaagattgtagctgattacctttaatgttccatcctaaatactaaacacccagatgcaccttttctaggaacttggaagattctgcttttcccaaccctcagacactgtcagtgctggggaaggtgacttcacttttgaaggcttatagcacagattgaccaacctcctaaattgtatttcttggaggatttaggtgtaggaatcacttaattttttgtaacttaatatatatttaaatctgattgtggaagtactataagtatatgaatggtttgtttgtttatatgatgcaaatgatacttaaatggtagaaacttctaaaaaaatgctctgtggtttctatatttatgattgttattggtgttgcaatttgctgaaaatgatttccttctgaatgattgagagagatcttcgtctctctcaacataaggctgtccacatagctgcttgctggaagcatttaggtggacatgttggagataaaatctggaaaggaaggaatccttgagtattggagtattacatgttgaccttactcctactctttaaaaaggagaacagcaagatcccactgagcatagaggtgatttcggagggaagagattggaatttgacctcagatatgctctttggtgcttatctgtatgtctggtttgctccgtggcctagcacgtagggctttaagagtgtggtgagaataagggaacagcagattaccaacagattgtctctgagtcctgccttgtttgttcctcctacagagaacttggtagagttgttcaaactagcaaaagataagaggcatttggtttgtcaataagcaactagaaaagcacagatctcagcaaaataaatagagaaaaaaaggactgagtcaaaaaatcataaatgtttaacttctccaaggacactactattggaaattattcatttagactttatttgaaactaattttaaaagtgtagacattgtactatctcctttttttggtatcatctcaactattttattgttagtttattcatattgaataagagagggagtaaagatttcacaatggcgatagctagtatatgccaattaagttaatttaaaaagttataccaactaccagtagcgaaaaaggactgtcaaaagtttaaatctaaataatgtaaaagatgtcataatttttaacttttctgtctttaaaggatacatagtataagctagagtaattatacgtagtataagctagaatataggaatttaattgatctaagaaataactgacacaaagtctctttacttcctgaacaaaaacatgctaaattccatgctgttcagtccatttcctttaaaggtgggctatgccacagggctagattttaaaacgtggaatttcacaccagtgctcgaaatcttatgaaagcaaaagggacctctgtagttgtactccactttggcttgagtaaaaaccactgctgtaccctttttctttcctttccctgcccatttttatcctcctccttgtgtccttgtggacatagaaatatgattaggcttagaggtgaacagtaaaggtcatttatgttatcttttcaaaacttaatagacatttatccatcataagcttgtcccccctcaaaatcatgattgacaagactaaataaagtgtatatcaggtgtctctttatggaggaaattgtagtaggatttatttaaaggatcaatatttaaatagccctatgccaattatcataaataattaaggacatgatattcctagctttcctgatttacatggaagtacgttaaatagtcacatctccaaaatttttcttgaatagttgtctttaaaaatgtgtttacatttgtaaggatcttcataaacagaaggggtaattcaaagataggcatggaattgacttatgccaattgattaaaacaaacatcctgtgtgttctgtgaaatacatacaactttaaaatgaaaaactcataattttatgcatgaattttggtgttcatgtggcttggaaatatgtgcattaaatggaattaagattcaaagtatttgctaatcttcaaccaactttgaattgttactggtgtggaagtgagcatattgttttagaatttctgaatctacatggatatccaagttatatattttttctgctacagaaagctttgttttccaagagaatttaatggcttagataataaagtttgaaaatcaatgtattttttttcctagaagctttcagaaaacttaaatctgttaataatctggtgaagtgctttattacacatacaaaattttgctctgtttgacagagtgtcagttagaaattcttgaaaaggttactataagacacaatttttatttctagtaatttaaacattgactgacatcataaagatagtgttttaagaaaagatagttttctgttctgcaagcataaattttctagctatttcattattatcttaaatggagttaacactacttagaaattgatgctacttcccttattttccttttattttaaacaaaagaaccaaaaccatactttaaattttgttgataacagtgatatacatcaaggtgtagaaatactgaatttagtatacacttcataaagtcatttctgttgacaactgattttggaaaaaaaataaatttaatcacttaataatttgatggatcaatggtgtgatttgggagtaaacttcttgaataaaaataaaacttgatgttttttccaaactgatagactgcttagactgatgagaaataaaactaggtctttaattattacctttgctatttgtctaagattctacccccatttagaaatgtgtttgttttacatcatctcatatggcctttggaatgttgtttccttcttaggtagtagattcattcttgatgaaaaccttccaaaattagaatttgctttaaaagaggctcaatacaataagtaaatgaagtctgtgttctgtattacattatttttgtaggatcgtttcacaattttctcacaattcttactttgatagtagagaaaataaaagcaagccaagagacttttttttaaaaatatattttatttgctataaacaactatgatttgcatttctcatgtgaagaataataattatcggctaaaaatggatttgctgcattgattttcaacgtaaatatttaaaagattaatgccagataattttattatactcacatttaacgacaagcaaagctgtttataatgatgactgtccatgtacacagttttaagttgaagtgagtgaatattcaagataattaaatgctacattttcattttcaggctcaagtggtcctgtcgaagtatttatcactgagactccgagtcagcccaactcccaccccatccagtggaatgcaccacagccatctcacatttccaagtacattctcaggtggagacctgtgagtatcccacccagaaaccttggatactgagtctcctaatcttatcaattctgatggtttctttttttcccagcttttgagccaacaactctgattaactattcctatagcatttactatatttgtttagtgaacaaacaatatgtggtcaattaaattgacttgtagactgaggggattttggttttggttttgggttttgtttttttgcggtgggggggctggtatttggaagaatttagctctttatgttacagaaatcttttttgcaaggacttagaaatgataatgcttaagattgttcttgcccaatgtgggaagagaatctaaggtttttatatgtcttgcaacctcatcaaaggaaaattactggcatcattttcataatttgaaaaaaaaagccaaattaatatatttcttttttgattcactttttaagtgatcatttttaaaactttacttttgacccactgaatttatttagatagaaggaaaagagatgatgggagggaagtttagataaaggatggaagttggttttatttaaacaatagccctgtgatttcctaatgagaagtgactagaaattgaagaaaccaaataaggaggatattggtcaatttagctttagtttctcttactctctcaagcctgccctgtttaactccaaagttcatggctcataatttgagaaacactgttttaaacacaggagaaaaaaatgtccattttaaatcatagctattgaattctacaattacaaagaaacaaacaaacaaaatttgaccaacccaggcggttaaatttaaactcttcaggaaaaatttaagctgttaaaattattctttttctaaatttctaaagtggagggacagaatttttcagatttaaaagggcctcctaggtgcccagaaaattagtggaaagaaccacgtctagacgcatctttgatgtgtcagagttccaaggataaaaagaaacttttaaagtcttctatactcagccaggttatcaatcaaatatgagggcaaaataatattttcagacagattttaggcagtttatcttccatatatccttttctttaagggtatttgtagatacactccagaaaaacaagagtgaaatatgaaggaagttgtggggtccagcaaacagtgcttccaaatcagacccctgatagaggtggaaaactttgcaatgcaacaactgcgtagctggcttagaggacagccaatacagatggaacagaaagatgaggatgggattgagggatcagggattgaggtctccaagaataaaaagggacttcatggaaaaagtaggcttgtggataattaatcacaggggcaaataatgcagttaaaataacaacatgacaatcaggtggaggaatgtataataaacccaaatgtggctgggtagagtggctcacacctgtaatcccagcactttgggaggccaagccgggcagattacctgaggtcaggagttcgagaccagcttggccaacatggcgaaaccccgtctctactaaaaatacaaaaattagccaggcttgggggcgcacgcctgtagtcccagctcctcaggagctgaggtaggagaatcacttgaacccaggaggcaaaggttgcagggagttgagccaagatcgcgccattgcaccctagcctgggcaacagagcgagattctgtttcaaaaaacccccaagtgtattataaggcaataattcctatacgaagcaaactaaaatgcagcaatattaaggtataaaaacaaagaggaataattccattgaaccttgattctggaaactttgatccacccagcagtcatgatgttagactcattgaaaagaatgtatttctaatgcatgatgcgatcggtctatagatgtgtcatggaaacttggttgcaacttcaagacaaaataaaaagtaaacatttacatgaaaaatggtggatatggaaggtggagaagagaggagataacagctttatctttcaaaatagagaattgagagatggtaccaaaagctgatgaagtaaaaaaaaaaaaaaaaaaaaaagatacttaatataatactttaaattacaaatataaacacaagaagaacaaatataatgatacaaatgtcagacactgggaatgtccaagattctggaaggaaagggtggtattattgagctaaatcctcaactttgtctgggcacagtggctaaaaattagccgggcatggtagcatgcacctgtagtcccagctacttgggaggctgaggcggaaggatcgcttgagcttgagaggcggaagttgcagtgagccaagatggcactactgcactccagcctgggagacagagaaagaccctgtgtcaacataaataaatatataaataaatcatcaagtctcatattaaagactctgtaaatatgacttattgttgacaaatgaaacaaatagaggtgtaagcatgttgtctacatggaggcaagaccagaataatagaaaatggaaacagattcccttaaagaggggaatcgtgtctttctcattggctcaatgtagtctccgtagagtctagaatgcttcagcacctggcacactgcttaacaaatggtgaatgaaaaaaaaaaaaagaaaagtcattctttttcttctttcaccctatgtccataatctggccatttgcagaacttgatgtccagtgatcgaaatcaacagcatcagtgcatccaatatcttctagtctctcatcttcttattacatcattaattttatttactttaaaattaaggatatccaaagtattatgtgagaccattgcaatgggagacttaaaagtggtataaaatgtactttgggccaggcgcagtggctcacgcctgtaatcccagcactttgggaggccaaggtgggcggatcacgaggtcaagagatcgagagcatcctggccaacatggtgaaaccccgtctctattaaaaatacaaaaaaattagctgggcatggtggcgcatacctgtaatcccagctactcgggaagctgaggcaggagaatcgcttgaaaccagaaggcggaggttgcagtgagccaggatcacgccactgcactccagcctgggcaacaagagcgaaactccatctcaaaaaaaaaaaaaaaaaagtacattgaattggaaagtcttcaaaaagcagcagtgatgaattttttgagatttttaacaattacaaaaattcagggttttttctaatggatgccacctgagactttattttctgttattttcttgtaataactaaccaaacaagctcatgttgaaaaatgattactaaatttgagctaattgcaatgactggtttcaaaattttccacagtgtatttgagttaaaatttcactgtgaagagtactacgatcactctcgcttattccaaaaatataaatggacacttgagtatttgaattattgaggaaatggttgactgggtaatttttaaaaatcactgggcacaaaaaatatattttgacttatattagtttagagtatttacacttgaaagagtctcatcttttctgaagggtgtttctttcatacacattttattgcactgagttttgtgacccatggcatattaatgaagctgaacaggatgtgaaatataaactggaagcaaaagattaaataaaccaaaattgcattttttctgtagtcttgtccaaaattgggtaaccacttctgatggggtagctcatatccaagaatgagtcacaaaaccagactcgttgaacctggtatatgatgagtcacaaagcaacattctgcctttgttttttcaggacaagaaacttgaattgtatcccactgagttaaaagataaaatatatggcattggcatttctgtacttcagagaggaatatatctgtttgtggtaggaataaaaaataagtgagagaggcaaagcttaggttcatcatattatgttactgatataacacaattaacttggtaaaagtgaaggtgtgggtgggcgtggtggctcacgcttgtaatcccagcactttgggagtccgaggcgggtggatcacctgaggtcgggagttcgagaccagcctgaccaacatggagaaaccccatctctactaaaaatataaaattagccaggcatggtggcacacgcctctaatcccagctactcgggaggctgaggcaggagaagcgcttaaacctgggaggtggagtttgcagtgagctgagattgagccactgcactctagcctgggcaacaagagcaaaactctgtctcaaaaaaaaaaaaaaaaagtgaaggtgcccagtgtctgcaactatgtcaccccgggcatatcacatatcactctgtttttccgtctgtaaaacgggagcaacaatgccattgccttatcatcagaaggatatggagactaaatgggagaatgtaggtaaacagcacagagtatgggtatcagtaagtaaactgcagcagtttgttgatgttaacaatagttagcattatatctaactatatctaacgatataaccattgggaatccagttttccatgattttcctctagaatggagctgcctaagtcctgcttaagtcatttttctttgaagattactgaacatcatcttcaaatgttcatccttgtaaacacgtgtgtgtgtgtgtgtgtgtgttaatttaaattttcagaaaaattctgtaggccgttggaaggaagctaccataccaggccacttaaactcctacaccatcaaaggcctgaagcctggtgtggtatacgagggccagctcatcagcatccagcagtacggccaccaagaagtgactcgctttgacttcaccaccaccagcaccagcacacctgtgaccagtatgtacacaaccaccctcatgcctcctacccccgaggttcctagagctaggctctcctgaggcaatgctttccttctcaattcatattcttccaggaggggcaccaacgttttttaaaatgatgttggcgacgaggacggtaaattttctagatgactgaaggctgactttcccctttctgtgactctctaggcaacaccgtgacaggagagacgactcccttttctcctcttgtggccacttctgaatctgtgaccgaaatcacagccagtagctttgtggtctcctgggtctcagcttccgacaccgtgtcgggattccgggtggaatatgagctgagtgaggagggagatgagccacagtacctgggtaagctcaatatgtcgctcaagacaggttcagggcagctgctggaaaactctccttgtgggggtgggtggcctctaggcaggtggtatctgtggtttggaactggttgacagctcagactgaacaaaccaccctctggcatgaggaagggaaggactgactctttctaagaagtggccgggtttttcccaagccactgtcacatgttcctggtccctgatgccagctgcatcatgcgcctacctgtgcacaagttcctacagcaaaagctgtgttcttggtggaagtaattaccaggactgcagctgacaatgtgagcacagtacggtcactcatacttttcaaattgttatggtgaggggcctttaaaaaacttcattggcgcactgaagtgtgtgccatcgtaagcactgagttcagtgaatttgaattcttataaagtgaacacaccacaagaccagcacccagatcaaggaaaagaatatctctctaccctcaccccatcatcttccgccaataatcactaccctgactcttactgcagagagctatttttaaaaatttggcattcgattacaaaaattatacgtctttagaaaaaaagttggaaaaatgaaaggaagaaggaggaggaggagaaaggagaaagacaagaagtggtgttttcccatagtacattaataatcacagattaggtgggtgcggtggctaactcctataatctcagcacttcgggaagctgaggctggtggatcacttgaggccaggagttcgagatcagcctggccaacatggtgaacctccatctctaataaaaatgcaaaaaaaatagccgggtgtggtggtgtgcacctgtaatcccagctactcgggaggccgaggcagaagaattgcttgaaccggaaaggtagaggatgcagtgagctgaaattgtgccactgcactccagcctgggcaacacagcaagactctgtgtaaaaataataataataatcactgattagctattagcacattaccttctagtcgcttttccctatgaatatataattcttaaaatatccttcttataagctgtagagtcatttgagggactagtttgctctgattagttaccttttcttttcatttcaaagatcttccaagcacagccacttctgtgaacatccctgacctgcttcctggccgaaaatacattgtaaatgtctatcagatatctgaggatggggagcagagtttgatcctgtctacttcacaaacaacaggtacatgtgtgctacatagtgttaaaagaatctttttctgtaaaacacaggcctgtagtagcacttcctgactgtttgccccactttctttctttcttagcgcctgatgcccctcctgacacgactgtggaccaagttgatgacacctcaattgttgttcgctggagcagaccccaggctcccatcacaggtcagctaagcgtccccctctttggctgctatgttaatcttaatgacatcagcagggagggcgcagattctgactgcggacctgcatatcactttaaatctccaatataatttatgggagaggggtttgtgtgtgtgtgtgtgtgtgtgtgtggcgggggtgggggagttattttctatggcacatttccccttgaaaccatttcaccaactcccttatacacacacaccacaacatacacacaacctgtaaagccagctcattggcttattaaagcaagtgttcccagggttgaagaggtgtaatttcctgaaaacgttgctctaagatttatccttaaggagaaagctgagctgtcgtcttagctcattaggtgattcaactgcctcatcactgaagttccaaaaagacacacacagtgctagacaactctgcttaggctggttcattaattgcttccctcgtctggagctcaaagaggaaaaatcagcttaacatgaatattttcacctaatggcatctctaattgacatttattaaggatgtcaggtcttcaaggatgacatttattattaaaaaggttcgcatgactgttcttattttatcttcgtgctgaatagtcattattagaagaagtggcaatattcaaagagtcaaaaagtatcactggctcttcactaatcaagcaagatgctaagggatattagaaaagggaggatttatggtgtttctaagcctctgtctcaaagaaaacagtgcatcttacttttgctcatgaatctgcagggtacagaatagtctattcgccatcagtagaaggtagcagcacagaactcaaccttcctgaaactgcaaactccgtcaccctcagtgacttgcaacctggtgttcagtataacatcactatctatgctgtggaagaaaatcaagaaagtacacctgttgtcattcaacaagaaaccactggcaccccacgctcaggtaacttttttaagaagacacttcctatgttatcttatcaggattgttcctgaaggagggttgttttgtctctgtcaacagtcctctcattcaagaaatcttatatattagtttttccctaaacttctgatatttagctgaaatgtcataagtaacttatcaaagctggctactggcctttctgattaaaaactgacaccataacgtccatctacaaattttcccctagaagcttaagggtcatttcatttttgattcttaagtattataaaatgattcagtaaaacaaaaactgttacattattttctgcagttatttcaaaggctttttctaaaaaattttttagtatcttttcttataaccctctccccccaccaccatatgacacttcatatgctggtaactcacttattacctattttagataaaaggttcaaatgtcataatttaagcactatgactggaccatgaaaatgtgatctgattaagagacaaaacttagcaaaactctcgaatgagaggctcaatgaactgcctaacatatccaagaaactggcttcttaaaagtaatcttcagcagagaatgtgaatgaccagttgactcttgtctgtcagatacagtgccctctcccagggacctgcagtttgtggaagtgacagacgtgaaggtcaccatcatgtggacaccgcctgagagtgcagtgaccggctaccgtgtggatgtgatccccgtcaacctgcctggcgagcacgggcagaggctgcccatcagcaggaacacctttgcagaagtcaccgggctgtcccctggggtcacctattacttcaaagtctttgcagtgagccatgggagggagagcaagcctctgactgctcaacagacaaccagtatgtcttctcctatctctatctcccctccaaattctccaccctcacttgcagcctgtgagaaagtgcagtaaaccattcactcagaggtgtatggcttagagagagggaaatacccagccggcaagggaatgcatagtgaacacaaagcacattaaacttgaaaacaaaactcagacaagctccatggatgctaagtggtaacccatttctaaaatacatgtaccagctgaagggtactaagaggggagaactgaagagaatctaatttgagtgcatttttcgtgtaactaaatatatctagatcaaagttaaaatgcaggatcataacacttagagtagaattcatttaacaatagcaattgtcaagtgtctagtattactagccaccagcttatctgctcagtttttacaagcattattctcatatttactctttgttttgaccttaggaaggaaggtcttattattattattttatttatttatttttttgagatggagtctcgctctgtcgccagggctggagtacagtggcaccatctcagctcactggaacctctaccacctgggttcaagcaattctcctgcctcagcctcccgagtagctgggactacaggcgtgtgccaccatgccctgctaatttttgtgtttttagtagaaatgggtttcgctgtgttggccaagctggtctgaaactcctgacctcaagtgatccacccactttggcctcccaaagtgctgggattacaggcgtgagccatcgtgcccagccggaaggtcttactagtatccgtattgaatacttaaagaaactgaggctttaaaaaagttctgcaacttgtagggtcacagagataggaagggatagagctggctctataacctatgtccgaagcccatgctctcaattattatactcgactgcctcttaaagatttcctctatttgaaaggtaatttaaatttcggtgggaaaactgctggttattattctcaagaataaactccacaacttatgtgattctgatagtgcaaactcaccagtatcctaccatgaatctgaggatacgttatcattactgtaattactgtctaatctgaaccatgtgaaaataacttttatttctctagcaaagggctattcacagaatattgcttttgacccatagagagcttcttcttgctgtcattttaggaggcatatccctttttccttaatctgtttggctcagagctaactgtgaacttcagaagtgtttgttttgcctttttaaaaataccattgctttaatgtaactataatttctgagactgatgcgaaagtcttgctggaaaattagacttcccaaaggatcacagtcaagcaaaatggttccacaatttctcatgactggcagagttttggcaaagttttgtgtagcactcaatctcttactggctcagtttttccagggttttgactttcacatagttacaaccttgaggagagaaaacttagacattcaatcaagtttcaggacttgagttatgatcattactgatctaaatatttcttggcatgtttcatcttttttcctagaactggatgctcccactaacctccagtttgtcaatgaaactgattctactgtcctggtgagatggactccacctcgggcccagataacaggataccgactgaccgtgggccttacccgaagaggacagcccaggcagtacaatgtgggtccctctgtctccaagtacccactgaggaatctgcagcctgcatctgagtacaccgtatccctcgtggccataaagggcaaccaagagagccccaaagccactggagtctttaccacacgtaagctgaaaattaagtgccttttcttaactatatttacattctctattcttcatgctttaaaacaaaacaaaacaaaacaaaaaaaacattaaaaaattagtacataatttaaatcagtgatactaaaaatgtgctccatagactggctgctggcccgttaattgtttgctgctagtctgcaacaagaaaaacggttgtgccagaacgtaaatcacaaagcacactgcttagtacagctgagaatttttctgaagccagattttcttgatgaaggaagcagtgtgttaatttgcacacattgccaagctcgctctttcctctagggccagcactttgagtaacatgggtttaaagcagtctgttattagaaaaattaaattcgattacattaaatgaatttaccaaacactagttaacgcaagaaaaaattagcacctatgtctacattctattactttgggcattgaatagtaactataaatgcagaataaaaatatctatggattgaatgggaaccaactaattgaacatgaagccaaggaaatgatttctttatgagtgttggctgcagaagattaaagtacttttgcagacggaatcgctcttttcttaaattactcttgaaattcctcagaggagaaaaatactaacaataatttttggtcatgtctatccttttgctcaacattttaaaggaagtggtcttaaatctcccacatatctacatcacaataacaacctctattcacaaaccgattcctattaaatacatttccatttacattacagagaattatgagactccttatttctagctgaacatcatttgttattttcaactcgacattttgaattatagaagcacctaacataagtactttttcagcatatattctaaccatggactagtttgcaattttctaagagctttcaacaaatgttactcttcgactaatttaaaagtatggatgttaaaaagcattcaaaaagtccatacaagcctagtttgtaaataactatggaattgatttcccaaagaaaatacaaacttttccccataagaattcatactttaagaaaaacttacttccatttaaatttactgtatgaagtttggctcatgaaggctttttcctaaataatagttaatcgtaagcaagtaaaattcacttttaatttgcaaataagcttacttgaaaatttggctaaaattttacacggttctaagatagtctaagatctactctcatgaaattaatgtctttatatttcttgtaaatattcatttcttataaatgtccttcagtgaattagaatggagatttcagtgaatgcgccctttcagtagatgtcgtcttttactaaaatgtagaattctatagttgtcttgttcattccttaacatgagacatattttatgtagtttcttttgttgaacacagtgcttataaaagaaaaagcatttttaatgatgctaacaataattaagggaaggtggtgggccaagatatttcaagtacttctgaagactgatatattggatatattattttatgctttgcataatacattcatataaaatataatgattttaactgaagtactgatagccaaaactaattttattagataaaggttaacatagtgtctggaacattgtatgctttcaaaaactatttggtgaatagataattgagaaaggaataataataaaaacagctaaatgaagcttatatttaaataaactaatgtaagcagggtattctacaactccatttgaactttaagcactccctaaggctgtaaacatccacaaggcttgcatgtttttgaaattactaaatttctgtagttttttactatcttactaagctgaattctgggagtaacttttctgagttttataacttgtgctaaattcttaagagcaaatgtgagaaaagttaggggaaaaagctgtttctggggaaaattcagcttagtcttatattgatagggcaaattttatttctttaacagctgggctgttcttccctaacaagacctgccagaacccatagctcacacttagaatcacatcctttgtttgacatcgtttgtgggtttgtggtttggtgattttcccataatggccttcccaggcagagagcatcatcttaaacttgggaagactctaggtggctggctcaagcaatagaaaatacctagtcttaaagcccaggacagttgaggcgaatataatttgtaaaaaaagttgtggttttcacagatgttcagtgaaagaaactgactgttctctgaattgttttttgtgggccattaaaaatggtcacacagggctggccatggcattttggcacagtcaccagcagtcaagtggtgtataatttcagaggtactaaaaggcatcgggtcacccatcccagtcatgtccccccaccccccaccaaacaccatcaaaataataacatacatagatgaaacagcccactaaaccagtagtacctcaattcagccattagagctatcattatgaagtggcccacacatatatttggctttttctcacacaatatttttaaaataaaaataaaaaatggctccttagaatccagactgaaaaaaaaatgcgagaattgcgatgttgattctaaattcccacatggcaaagaaaaaaaaattgactggagttgagttgagactggagtctgaacactttttaatccctgtttgtataactctggagactaattctttgtcttgccagccattcataatttagtataaatgcattcagaggttttttcccaatgggaacaaaatttgattgagatgtaaagagaggaagaattgtggagatgtcaaacatgtgaccagagctatgaacacacttgatacccttgaacttaaacttacccaactcaaaatatctggccttctgcgatcttacctttctacatttataataagatttgcaaggttgttggaaatctctatcttaactttatatatacatgcctctttctttctttttctttcctttcctttccctttctttctttctctttccttccttccttcctttctctctctctcttttcttcctttcctttcctttccttcctttctttcttcctttctttctttctttctttctttctttctttctttctttctttctttcttttctttctttctctctcactctctctctctttctttctttcttatttttggtgctaaaacccaaaacaaatcttttatttaaaaataagattttttttttttttggccaggtgtgatggctcatgcctgtaattccagcactttgggaggccgaggtgggtagatcacctaaggtcaggagttcgagactggcctggccaacatagtgaaaccccatctttactaaaaatacaaaaattagctggatgtggtggtgggcaactgtagtcccagctacttgggagtctgaggcaggagaatcacttgaacccaggaggctgaggttacagtgagatgagattgcgccactgcactccagcctgggtgacagagcaagagtccatctcaaaaaaaaaattgtttaagtaaaattttattttctttcttttttttttttttttttttttttgagatggagccttgctctctcaccctggctggagtgcagtggtgtgatcttggctcactgaaacctccatctcccaggttcaggtgattctcctgcctcagcttcccaagcagctaggattacaggcatccaccatcacacctggctaatttttatatttttagcagagacaaggtttcaccatgttggccaggttggtcttgaactcctggcctcaagtgattcacctacatcagcctcccaaagtgctgggattacaggcatgagccactgcgcctggccaaagtaatattttcaataagaaaaataacagtgatgtcaggatgctagaaaatgcaaaataaatttgttataattcctgattctggtgataaaatactaaatttttgcagtattattctgaaagaataatcacgtatttaaagtacaaatctttagacttcaaagtgcatccatggtggcagattttgtttaacttttatatagcatcttttattgcaaccaaaaatagctgaccattattgtggaataattcagcgtaaagctttttttttttctttttttgagacggagtctcattctgtcacccaggctggagtgcaatggcatgatctcggctcactgcaacttctatctccagggttcaagcgattcttgtgtctcagcctcccaagaagctgggactacaggcatgagccaccatgacagttaatttttcatatttttaatagagacagggtttcaccatgtttgccagcctggtctcgaactcctgacctcaagtgatccacccacctcggcttcccaaagtgctgggattacagtcatgagccaccgatccccgcccagcataaagctgtttttagatcaccttctataatttaccattgttcttaaattaatggttaagaaacaatatgataatcagtttgtggtggccagttttacattttataagggattttacactgacgatatagggaaatttattgtcatcaaagtcaaatcccaacaatcataaaaagacatgaattagattatataatttcaatgaaaggaccaccttagcaaacatctaaccccttgttactcaggtatcattcacgggccagcagaattggtattatctgtgtttgtcagaaatgcaaactccctagttttttgttggacctccagaaacagaatctgcattttagccagaccccagatgatgtgtgtggcacattaaagattgagaagcctgatcctctcccaattctcacccaatgaaaaaatatgttacatcctctatccactgcttggttaaactgaggttctccataaaaatacttgttatctatatgctatgcaatcatctgtgagtttgagttttgaatatgtgcattgattctctctcacagtgcagcctgggagctctattccaccttacaacaccgaggtgactgagaccaccattgtgatcacatggacgcctgctccaagaattggttttaaggtaaactgcagatgttcctaatctctgtgatacagccctgagctgtccttgtggttcccatgtagtggaaacagggtgctcaggagtcaggagacctgggttttgtcacctgcttctgtccatacatctttgactacattgtcagggcctaacagtccttccctgcctacctcactgaattgttggaagggtagatggaggctgcgaaagtgttttgcaaaggataaaacattagcacgaagctgctgcttattgttatcttattttctctatcctttcctgcagggaattacatttcaaaaaaacatgggaaaactttatttgatgtgttgttctaaatgagtgtgaacaagttcacaaaagccagtttagggagaccagttaaactcagagtcacttaaaaatcgcattttcatccaatcagtttcatctccaactgttcaaagcactgagggtgaatctcttaatagaagttaagattaaggtttccctgtggatatctggattcatcttctttaaagtaatgatattagggaagcggtgaatacaaatgaatatgtttaaaagaattccattctttggcatttagtgtgaagagagaaatatttgttatcgctggaaatcatgactcaatccccttgatcgtttaaaaaaatacaccaaagataaagtttgtaaatggccatatttatgattatgctactcaaatatagaagaactttctgaagagtgccagtataccttttaattcccttaataatgtcatgctgactttcagaagccttatgatgtgtgaaggatctctctagagttgaacactattggataacagtgttacctaagtttttgaaatagaatcttaaaaggattttaaattatgggcatagttattctaattcttctcttgtaatgtatcatcctgcagttgaagctatgtacatatctcttcaaaaggtgtgtttttgcaatacagttgctacaggggctggtgcctttaaatggcaactaaaaggttaattgaatgtgaataactcgttaaagggagagctcagacattccttctagcacacacacagaaaaatagaaatgaactaccatgtgacccacagtccctgtatacgtctggtttgtaacaagagattctttatcaagcaaaacagtatgtaatgacatttctctggaaccttccattacaagccaccttaatgcagtttggaagatacctcccccacctgggggaatttccagctaaagtatataaaagagtccccaaatcatttcccaataaaagtacactgtgcagtttctgaagagtttacactatttaaagcataatcatagcctcacagcagtaacagtcctctggaaatatttgtccttggtgtttactttgcattccttcctctagctgggtgtacgaccaagccagggaggagaggcaccacgagaagtgacttcagactcaggaagcatcgttgtgtccggcttgactccaggagtagaatacgtctacaccatccaagtcctgagagatggacaggaaagagatgcgccaattgtaaacaaagtggtgacacgtaagaagaattttttcccttttctattagtttttaaaactgttctacttttcgaaaaaagctagtgtcaatatcactttttacttatgagaatggcacaggggagatatcttatccttacttatattattaatgctattcctgaatttggagtagcaggttcaattcatgctttatattttatggcatcagaaatgttctttccatgtcaagaatatttatgaactggcaagatgaaaataatttcaatagtattgcaaaatcattaatcataaagaagtctttgtcagagaattactgctgtccatcatattttcataatgtaacctatatttttatgggagggagggagggagggaagaagcatggaagagagggaggtagggaaggaggaaagattacacaggtcaagagctttgtgtcagctttgacttttaaaatgttctttctgcatagcattgtctccaccaacaaacttgcatctggaggcaaaccctgacactggagtgctcacagtctcctgggagaggagcaccaccccaggtaagtttgggatggatcagagggcaagtatacaccataccttcccaagacaaagattttagaaactgtgtttctttcagagaaagaagggattcaaattacaaatgcttagctctccataaaaactatagcagtacatgatgtacatcatggagcagcctgcaggatgctttaatgcacgttgacttcaatcacaggaagcagaacaaccttacactagtctagggggacaagacagatcctcacacagctgtagggctgaagaaaagcactgtggaaggtggcttttgctgagtgcattaaaaattgccaaacaaatggttgaagtcatattacgtaatttcccttttgtgagttgttacagagcctaagtttattattccctgaagttttatgaatgttttgtcatgggttgcaccacaaatatttaagggtgatgaaaggcagaaataccttcattttacagaataagaaaactgagacttagaaaaaattggcctactcatagtcacacattttaaatgttacaaaactgggattgtaacttaagtttgtagactccttctcacacccaatgtcacatatttggaatgtaatttttttttaattatattctatgcaaactgaaaattctgattaaggggtttcctgaccatttttagagctttaaatgaagcatttgtctaaattccttgttcacatatatttgaaaattatttataaaatgctaaaatgtataaagatagttgttaacaatattcaaacagcatgacgtactatagcaataacaggaaattttagatacccattacttttgccaaaaccacatggaagtctcaacaaacctatggagaaaaatcttaaacaaaaataaaagttccaattaatgttgattgcattcttacctcatatacttgttaatttaagggatatgtttaggttattatttagctatttctaattttactgtaaaattcttgtgaaatttttgtttaaaaaaaagtattatatagttcttatctttgccggggcacagagctaaggctatcatctctaaatctgattaatgtatgcaaacacacagaatgaaactagctcagaatatctcttttaatctccctctgaagtagagtgattttggtaaagttttcattatctgcggaaacattgtttaagccaaagctatacaatttccagctgagttgctctgaatttgaaactttaagttgacaatcttcgtgcttgttagcagcaggatcattaatatctcgtctcaatggcccagcccacacatatggatgaccactagcaagtgtaatgatctcaatatttatttctcattcagttgggtttccttgtatttgccacattagtgtttaccctgttcctaatggcaaaatattctgtcatctccttgccttttataaagtttaatatactttctcattttaatctgtccccacagatctctagtcatcactgtttttatttgaatgtctctcatccctctcaactcttttactgcccaatttctgtgattcctgaagacttcaacaatcaatactctctttttttgtttgttttgttttttttttttgagacagagtctcactctgtcacccaggcttggagtgcagtggcgccatctcaactcactgcaacctccgtctcctgggctcaagcgattctcgtgcctcagcctccccaagtagctgggactacagacatgcgccaccaagcccagctattttttagatttttagtagagacagggttttaccgtgttggccaggctggtctcgaactcccaacctcaggtgatctgcctgcctcaacctcccaatcaatactctttctagaataagtatcagcacttttgtttctcaccttttctcctttcttggttctcttcctataaatcccatagtttcagaccttttaaattaggagagctctctggggaatgtgcttaaggtggagagcgattctatactaggcaggtagaaaggaatattcctcagctgtcttcaaatgattcattaaggaaaagcagggtacagtgataggaccatgagatttggaaacaaagaaagctttggggaatcactcccctggttcaagatttcctttaaagtgaggatcttggcggaggttgaagtgagccaagatcacaccgctgcactccagcctgggtgatagagggagactgtctcaaaaaataaaaataaaaaaataaagtgaggatcttagtactgcctgaaaggattgttgcaagcattgaataacagtgacagtggagtcctcagtaaatgccaagtcctgcattccgccctgtgaatccatcattggagtctagttaaatatgctctggctcacagatcctctgtgcaataacttcccttttcttttttctccagacattactggttatagaattaccacaacccctacaaacggccagcagggaaattctttggaagaagtggtccatgctgatcagagctcctgcacttttgataacctgagtcccggcctggagtacaatgtcagtgtttacactgtcaaggatgacaaggaaagtgtccctatctctgataccatcatcccaggtaatagaaaaataagctgctatcctgagagtgacacttccaataagagtggggattagcatcttaatccccagatgcttaagggtgtcaactatatttgggatttaattccgatctcccagctgcactttccaaaaccaagaagtcaaagcagcgatttggacaaatgcttgctgttaacactgctttactgtctgtgcttcactgggatgctgtgtgttgcagcgagtatgtaatggagtggcagccatggctttaactctgtattgtctgctcacatggaagtatgactaaaacactgtcacgtgtctgtactcagtactgataggctcaaagtaatatggtaaatgcatcccatcagtacatttctgcccgattttacaatccatatcaatttccaacagctgcctataaaatagttttgtccctgtatgtgagcactgaaacagcatttggttgacacatctagtttttcatcttgcagtttcaaatccttctttttgaaaattggattttaaaaaaaagaagtaaaagtcacaccttcagggtgttctttcttgtggcttgaaagacaacattgcaaaggcctgtctaaggataggcttgtttgtccattgggttataacataatgaaagcattggacagatcgtgtccccctttggactcttcagtagaatgcttttactaacgctaattacatgttttgattatgaatgaactaaaatagtggcaatggccttaaccttaggcctgtctttcctcagcctgaatgtgcttttgaatggcacatttcacaccatacattcataatgcattagcgttatggccatgatgttgtcatgagttttgtatgggagaaaaaaaatcaatttatcacccatttattattttttaaccttcttcatgcaagcttattttctactaaaacagttttggaattattaaaagcattgctgatacttacttcagatattatgtctaggctctaagaatggttttgacatcctaaacagccatatgatttttaggaatctgaacagttcaaattgtaccctttaaggatgttttcaaaatgtaaaaaatatatatatatatatattccctaaaagaatattcctgtttattcttctagggaagcaaactgttcatgatgcttaggaagtcttttcagagaatttaaaacagattgcatattaccatcattgctttaacattccaccaattttactactagtaacctgatatacactgctttattttttcctctttttttccctctattttccttttgcctccccctccctttgctttgtaactcaatagaggtgccccaactcactgacctaagctttgttgatataaccgattcaagcatcggcctgaggtggaccccgctaaactcttccaccattattgggtaccgcatcacagtagttgcggcaggagaaggtatccctatttttgaagattttgtggactcctcagtaggatactacacagtcacagggctggagccgggcattgactatgatatcagcgttatcactctcattaatggcggcgagagtgcccctactacactgacacaacaaacgggtgaattttgaaaacttctgcgtttgagacatagatggtgttgcatgctgccaccagttactccggttaaatatggatgtttcatgggggaagtcagcaattggccaaagattcagatagggtggattggggggataaggaatcaaatgcatctgctaaactgattggagaaaaacacatgcaagtattcttcagtacactctcatttaaaccacaagtagatataaagctagagaaatacagatgtctgctctgttaaatataaaatagcaaatgttcattcaatttgaagacctagaatttttcgtcttaaataccaaacacgaataccaaattgcgtaagtaccaattaattataagaaatatatcaccaaaatgtaccatcatgatcttccttctaccctttgataaactctaccatgctccttctttgtagctaaaaacccatcaaaatttagggtagagtggatgggcattgttttgaggtaggagaaaagtaaacttgggagcattctaggttttgttgctgtcactaggtaaagaaacacctctttaaccacagtctggggacaagcatgcaacattttaaaggttctctgctgtgcatgggaaaagaaacatgctgagaaccaatttgcatgaacatgttcacttgtaagtagaattcactgaatggaactgtagctctagatatctcacatggggggaagtttaggaccctcttgtctttttgtctgtgtgcatgtatttctttgtaaagtactgctatgtttctctttgctgtgtggcaacttaagcctcttcggcctgggataaaataatctgcagtggtattaataatgtacataaagtcaacatatttgaaagtagattaaaattttttttaaatatatcaatgatggcaaaaaggttaaagggggcctaacagtactgtgtgtagtgttttatttttaacagtagtacactataacttaaaatagacttagattagactgtttgcatgattatgattctgtttcctttatgcatgaaatattgattttacctttccagctacttcgttagctttaattttaaaattacattaactgagtcttccttcttgttcgaaaccagctgttcctcctcccactgacctgcgattcaccaacattggtccagacaccatgcgtgtcacctgggctccacccccatccattgatttaaccaacttcctggtgcgttactcacctgtgaaaaatgaggaagatgttgcagagttgtcaatttctccttcagacaatgcagtggtcttaacaagtaagcagttgaatgtatctgttccataaatattaacctagagcatagcaaatgaattctaaattctcaagtaggaggagctaagagcaagagagctgcaaccaagctacaaactaaactctgaattcaatgcacagctccattaattttgaaagatgtaatgtttgttgctatcttaatatacttttgatatctacagctttaaaaaaatcatagtggaaaaacacctgcaggaaagttccatgacttcaaacaaattctgcttctaaataagcacgtaaaaataagtgaatatcaagagaaattatatgactaaatctaaatctttagagaaaaaaatgagaactgaaaatagtgtcaccatatgtgctttattctcatttttataaaaaaagtgtcagcagttgattgatttaggatttgaatacttagaaaagtgactgattgtttggtctagattagaatgttgttgtgaagagagtcagaagtttaatttgtacttcaaaaagaatctgttagaaggatttctcagaagactgagagcttagaaaaaaaactgacattaaataaataacaacaatttatggaaattgtctctttctagtcccaaccattatagaatagacatcttttgttaaagaataaaacagtaggctgcaagatggtgctgtgtttcacataaacagtgctttttattattttcactgtaatagtcaaatatataacaacagcaaaagattctacataagggaaaaatagcttacatttaggtacattaccaagtattagtctgaaaacatctacctttcaaacataatttagataatgaaacacaaagaagagcagctcagcgtgaccataatcttggtttcttactttgtggctgagggcaagaatatctttatattggcatatccaccaccccagggctgttgcttctgttctagagcaccctggaatcactaattacagcatcacccagtatacaagcccctgcatcacaatgtctgtcccttagccgtagacctgtcacatgctaatcatgtgttctaagaccttattataatcctaatgctacagatgacctcagggtagcccctctccctcctagcaaagtcattattatcctcttttaaagatgaagcaaaccagtgcagtggctctcgcctgtataatcccagcactttgggaggctgaggtgggccaattgcttgagcccaggagttcgagaccagcctgggcaacacagtgagaccaagtctctacaaaaaatacaaaaattagccgggcatggtggtgcacacctgtggtctcagctatgtaggaagttgaggtaggaggatcacctgagcctggggaggttgaggctgcagcaagccatgatcgtgccactgcactccagcctgggtgacagagtgagaccctgtctcaaaaaaataaacaaacaaataaacatgaagccgtcgaggtccccagcagttaagtaaattgccactggccagctagtatggtggaaatggaatccaggcatctggtcctccattctggcacttttccaaacttttgtagggggctttatagaaacgctgaagggcaaatggtgtgcaggggaatgagggtttagtgagtaggagttccaaatttagaaacctcactctctgtatcttttagatatacaaatatttaccatatattacagttgcctctagtgttcagtacagtaacatgctgcacaggctcatagcctaggagcaataggctagaccacatagcttatagcttaggtgtgtcaaaggctctaccatctaggttttttgttttgttttgttttgttttgtttttgagacggagtctccctctgttgcccaggatggagtgcagtggcacgatctgggctcactgcaacctccaccaccaaggctcaagtgattctcctgcctcagcctcccgagtagctgggattacaggcgtgagccaccacgcccagctaatttttttgtatttttagtagacgaggggtttcaccatgttggccaggctggtttcaaactcctgacctcaagtgatccaccctcctcggcctcccaaagtgctgggattacaagcccatctaggtttgtgtaggtacactctatgatgcttacacaataaaatcaccaaatcacacacttatcaaaatgtatctccaccattaagctatgcctgactgtgtatcaaaatggaagaagaagctgggcacagtggctcacgcctgtaatcccagcactttgagaggccaaggcgggtggatcacaaggtcaggatttccagtccaagcctggttaacacggtgaagccccgtctctattaaaaatacaaaaattagccaggcatggtggcaggcacctgtaatcccagctactcaggagtctgaggcaggagaatcacttgaacccaggaggcagaggtttcagtgagccaagatcacaccactgcactccggcctgggcaacagagtaaaacctcgtcaaaaagaaaaaataataaaaataaaaaaaaatggaacaagatactcagggatgtatatttaattttttaaaaaatattctgctctcattttaatatggcagaaccgattgctttctaagtgtggcttttttccagtaaaggttaattattaagaccactagtcctggcctgggtcaatcccagtatgatcctgggcaagtaaattaaagaagataacttctctgtgcctcagtttttttttgttttgttttttgttttttcatttacaaaatggagataattgtagtaaatcaaatttttagaggtgataggtttgttcatttcttgaatgcggtgatggtctcccaagtcacacatatgtaaaaacccatcactttaaagatatgcagtacgttgtatgacaagaaattgcttttaaaaggagcaaactaccttccagggttgttgtgaggcataaatggcaatccacagcaccacagcaaggattatcatgtgccctccagagacatactctcaggtggatgcgagaaatatccagctgttgcagcaacttcatcccactcgaaatccagctgagtcacactcacaggtggaatggagggcttcgagaggccatggggcaaggtgacccttccttatcatctaattacagaccttctcaaggtctgttcactgaacacttcgctgtagtgttcacttaggtgtaagtaggctataggactggacatttggatatttcatcagttcaaatagtcctgggcgtgctttagtttctcatgcttttgagcagagttttaaaataagccccatttgcccctacagatctcctgcctggtacagaatatgtagtgagtgtctccagtgtctacgaacaacatgagagcacacctcttagaggaagacagaaaacaggtgagtggtgttggcagtatgactatccagtagcttttgcctatcaattctgtataacaaatgaaatgctacttctaaaaatacatctccattttttgttgtcatggtgtgtgtacctttgtcatcacagtatgattttatcgctggtctcaaaaactaaaagataccttactcaacaatcacctagactttcagtcactaacaaattaagaaatttgttgtctgtccttttaaaaaacattttctaagaagatctttgttatttagatttagcagacattccttttcattaggcagctctgtctaatggctgacccaacactcattgtcatctatttgtcttcctttactaagccagcaagtttacattttctttttacttaataaaatatgcatttactagaaggaagttgaattgaatctcataaatattacatacttaaatatgaatgcttttaattttttctttcaaaaggtacactttagtgtattcattaatttatttatagtccacttgcttccaaaaaggacttatgatatcttagtttggtttcttattgaaaagaactagtaaatgctgtaactgaaacagaaatttgctggaagtcccagagactaagtgatttgaatttgcaacaaactctgaatttttgtgcatttttgaaaaatgcatttttcaaaactgtcaattcacgaggaattatcagcattgtaatttgtctgggataatgtctttagtttcagaaagttttgtgtttggcatcattaccactctgttgacatataaatttcctcttgagcttaggaggcttctctgagagtcaaacatttactttgagagtgggcagatcttgctttacttggaaggatacacttacaggatagaaacacagaatacttgaacactgaagaatttgaaaatgtcaattctcagaagatcttgaacacttatctccaaatgtgacacagaaacttactgtaataacccctaaaatctgcttgaattacttagcacaagaaaaaaatgaatgcttgagctggctattttgaattgagtcaatttaagattttaaaattcatatgtagcttagaatcagtacatcttactctttggtttatggcaaatcatggtattgatgagacaggaacgaaatgttggatgtacgttaatttcccctacaccttcctcacttcctaaactggtggtgtcttttcttttttttttctcttcctcccccgggtgggaaaaacaggtcttgattccccaactggcattgacttttctgatattactgccaactcttttactgtgcactggattgctcctcgagccaccatcactggctacaggatccgccatcatcccgagcacttcagtgggagacctcgagaagatcgggtgccccactctcggaattccatcaccctcaccaacctcactccaggcacagagtatgtggtcagcatcgttgctcttaatggcagagaggaaagtcccttattgattggccaacaatcaacaggtaacttttcttgtctgcaaagaaactcagaagactttcctacccagttggtagattctgtaaagtagcttgctgttgtctgtcatcagctctcaaaaaaaaaaaaaaaaaaaaaaaaaatagatcattgtcatggtacatggagagggaagtgagaaaatgtggagaaacatcttccttagaatatggtaaagaagcccgggcgtggtggcagtaaagaagataatttttttcctctcaagaaatttctcacctgatttgggtatttatgcatttctaataacacaagttttgttgaaaatgtagaaaattggccggacggggtggctcacgtcagtaatctcagcactttgggaggccgaaatgggcagatcacttgaggtcagaagttcaagaccagcctggccaacatagtgaaaccccatctctactaaatatacaaaaattagcaaggtgtggtggcatgcacctgtaatcccagctactggggaggctgaggcaggagaatctttgaacctgggaggcgaaggttgcagtgagctgagatcaggccattgcactccaacctgggtgacagagcaagaccctgtctcaaaaaaaaaaaaaaaaaaagggccaggcgcaatggctcacgcttgtaatcccagcactttgggaggccaaggcgggtggatcacgaggtcaagagatcgagaccatcctggccaacatgatgaaacctcgtctctactaaaaatacaaaaattagctgggcgtggtggcatgcacctgtagtcccagctactcaggaggctgaggcaggagaattgcttgaacccaggaggcggaggttgcagtaagccaagattgtgtcactgcactccagcctggtgacagagggagactctgtctcaaaaaaaaaaaaaaaaaaggtggaaaactgaacactgtttcaaagtacctttaaaaatataattttagggtaatagtgtcattgttcttagcagatagaggctgaagtacttacgggaacagtagcatcatgttatctgtattttagtctcaagtcgtcaagccagagacaaatacctaagggaagggtatataggtgttcattgtattacttttttttttttttttttcttcctgaaatggagtcttgctctgtcgcccaggctggagtgcaatggtgggatcttggctcactgcaacctctgcctcccaggctcgagcaattctcttgcctcagcctcccaagtagctgggactacaggtgcccgccaccacgcccggctaatttttgtatttttagtagagatgggattttaccatgttggccaggctggttttgaactcctgacctcaaatgatccacccgcctcggcctcccaaagtgctgggattacaggcgtgagccaccacgcccggccttgtatcacttttttttttttttttttttttaacttttctgtagttttgaaatttttccaaataaaatgttgagggaaaaaaactcttccccaaatttgaaataatcattttatcacaatttgaatgggctctgtaaccccttatcttgaattcgtcataatataaaattctgctaattacacgtagtatttacatgattgtatggaagaatcattaagacaattatctggaaaatgaacaaacagtaaatctgaatattgtttgaaaattacggatgtgaaaagtttcccttttttttctagtttctgatgttccgagggacctggaagttgttgctgcgacccccaccagcctactgatcagctgggatgctcctgctgtcacagtgagatattacaggatcacttacggagagacaggtacagcagtaaaatgctattttacactctgattaaatcagattctgttgtggataacctgaaagcccaacagtgaacaaagaattaaagaaactttggcaagtccattcaacggagcccttgttttttccaagaaaatacgtaagatatagatgatataatttgttctaaaacccaaataaaaagttgtttatatactacaactagagggggaacggcagagctgaggaaataaaaggattgtaaattcacaaacatattatcagtggtggaaataagtgatttttattttttcttctctttacttttctgtattttccaaattttatttaaaaggaatgtattctgttaaaagttttaaaaaggacacaatgcatgcaatcctgggttgagggcttaccttctcccacttctaatgctactctactactcagtgacattttaaagctgaaatgttaaaacagcgctaactgtaattttctctcaatgtttatacacttaccaaggtttgctacatgcataaatacccctttctgttcaagatagcgctctttaaaagggaataagcaagaagatgtgatttacatgctgctataaatgtggtaattcaattaatcagtaatacccaagtagctctaaacccctcacactctgaactaaccctttttcatacaggaggaaatagccctgtccaggagttcactgtgcctgggagcaagtctacagctaccatcagcggccttaaacctggagttgattataccatcactgtgtatgctgtcactggccgtggagacagccccgcaagcagcaagccaatttccattaattaccgaacaggtacaaacttctactctggggtgacaccagcttttacttattcagatactgttttgcaatgttctcccaaggtatttttctaattgtagaatagattttcctttttaatgagcaacaacctgcagctagcacctgcagcgaacagagttttgagccagataaagaaggaagcaccccaagggcaggaagttcagtcagttttgtcgatatattccgcatgtctgcaatacgacaggcatagagagtgttcagtaagtatttgtgggaaaagaatggatgagttgataaagtaggaagagacacctgcttgtggaatgtagcttctttgtgaatgaagcaaccatctcaaaaataggaaatggtattgagatgcctgccccatccctctaaaagctctctctgtattctttcgagaagaaatacctttctcatgtaagcgatcattcgaatatgtaccagacctagagaggaggacttgtccaatcttgtctccaaggactggggcttcactggtttctccctgcttttatttgtagaaattgacaaaccatcccagatgcaagtgaccgatgttcaggacaacagcattagtgtcaagtggctgccttcaagttcccctgttactggttacagagtaaccaccactcccaaaaatggaccaggaccaacaaaaactaaaactgcaggtccaggtaagaatcatctgcatctcggccaggtgcggtggctcactcctataatcccagaactttgggaggctgatgcgggcagatcacttgaggttaggagttcgagaccagcctggccaatatggcgaaaccccgtctgtactaaaaaatacaaaaaaattagctgggcatggtggcttgtgcctgtaatcccagctactcaggaggctgaggcaggagaatggcttgaagtctggaggcagaggttgcagtgagccaagatagccccactgcactccagcctgggtgacagagtgagagactccatctcagggaaaaaaaaaaaaaaagagtaatctgcatctcatatacaacaggatagatggggtaggaccacctaatattcttttttatataaatggctaccttgttgtgagtactatgtatttttttgtcctatgtcatcattgtccccattcatgagttcagggctcaagatcattatcaacccttttcacagtagaagtcttaagtgcatttctgtttttacatggatagttctatttagtgatatggacatcttaaattactagattcacccttctggttttgtttatcattcacactaagaagagataaatggcctaactgactttttcagctctttttagctatgttgtctttgtttttaaatagaatacttgtgaaattaggatcttaaggcaatttattagagtcaagttaattttcattttttctgagagcagtatcactaattgttgggggcatcatattaagttttagatcttatccttgagtgtgacttcactcccatatggtaatttgtattagcaatgaacaggtttgtccaagaggaaatcaaagtctgactctccatatttttgttacaattctgcaaataaaaattctaggccaccatatgtttactaccaaactctagacgccacttgaggactttatagtggatgacgtggatgttgcatttgcttttcactccctttgcagatcaaacagaaatgactattgaaggcttgcagcccacagtggagtatgtggttagtgtctatgctcagaatccaagcggagagagtcagcctctggttcagactgcagtaaccagtacgtaaccactgcttggtttccattttcaaagtcaaattttgttcttgggtgtctgaatgcccacgacatgtcttttgcaattacacatagggaaagtgaacttgttggttagtttatgtcttgagctgagccctttacgaacatcttttttccttctcagtgccaagcgaggaatttacagagaaagaagttgtgaaaccaccatagttagttgctgtgctttgaatttcttttgctcaaatggcctcagcgaaatcttatttgcctatagcaaatctacaaaaaattttcctagaccgtcttttctacaactggatggtaaagttgattgaagtgtgcctcatgtagctttatgtttggggcatttgaagggctatggctggaccagagtgtaatataaatgcttaatagagaggggaaaagaagagtgtaagaaccattatagggctgggctcacgcctgtaatcccagcattttgggaggctgaggcaggcggatcacgaggtcaggagttcgagaccagcctgaccaacatggtgaaaccccatctctactaaaaatacaaaaattagccagtcgcggtggcacgtgcctgtaatcccagctactcaggaggctgaggcagaagaatcacttggacccaggaggcagaagttgcagtgagccaagatcatgcctctgcaccccagcctaggtgatagagtgagactccatctcaaaaaaaaacaaaacaaaacaattataacaatttgaatctgacattgcaaatcagctttaccacttccaaggtatagaaaatccaggtctatgagactaacatcacattgtaaaaatcaaatcgtggtagaatatctttaaattaatataaatacatccccattgtggggacattttgcagggtatctgcttatctcacatacacctatgttttaataagtgatgcaacattgcatattttctaaaccaagaaaaattaagcaagtgtttaagtgatttttccttttgatagtgggttaattggacttcatcaaagaaaatggtatctgcaaaactgctttgcatgttataaaaatgcttatttcacaacttgcttttcacataacctcttaccattaatttgcctaacagacattgatcgccctaaaggactggcattcactgatgtggatgtcgattccatcaaaattgcttgggaaagcccacaggggcaagtttccaggtacagggtgacctactcgagccctgaggatggaatccatgagctattccctgcacctgatggtgaagaagacactgcagagctgcaaggcctcagaccgggttctgagtacacagtcagtgtggttgccttgcacgatgatatggagagccagcccctgattggaacccagtccacaggtatatggttaattgcaccaccaggtgcccatgggagcagcggctttatgccctactgaatgaattatgcttcactgggctattgattcccgtgtaagggtgaaaaagaattattaggaaagatcctctttaaagaggaatggtaagaaacaataaaacttaggtgatatttaaggaaacaagtctgattaaaagaaattttggagtatcctggcttatacacaagaccataaagcaagacatttgaagaggatactaaagttgtggattatttcctaagctctgactccctgtgattaccctcactatgtataaagaaaagaagtttggcattacagagcttacttataaaaaggaacccaaactcgggcatttcatagcagcatgattctgagcacacgtgggtaagacctttcttctctggttagatatcatatgctggtgtataattagcttaaatgattgtgatttagacacctaggaaataatcaatagggcaattgctttccataatactttatcttcttgtgctttatttctgaagcagagtagaatgctaaagatgtatcctagtgacagcataaaccctagaggtgacagtctgtattattgcttttcgcttctcttttctgcttctgttgggagccagttttcttcttacgccgcattacagagagaacgtcaaatttagcagccatatctgccatagggtccaaataaagagacaataaaaacattattctctcttttttggatggaatactgcgtgaaatggttatccatacaaagatactttatgtagaatagaaaaaggaggccgggtgcagtggctcacacatgtaatcctagtgctttgggaggctaagccgggagcactgattgaggccaggagttcatgatcagcctgggcaatgaagtgagaccccgtctctacaaaaaaatatgaaaaaattagcgaggtgtggtgacacatgcctgtagtcccagctactcaagaggctgaggtagaggatcacttgagcctacgagttcaaggctgcagtgagctatgataactccactgcactgccgcctggatgacacagagagaccgtttctaaattaattaattaacaattttaagaaagaaaaagggccattgcttatttttccatacaaaagtaaaataaatcataatggccaataagccaatgtaacttttttttttaagggaaagcaaaacttgtaaaacctaaaatctcttagagttttggcatttacccaaatgttttcagtgattctgagaattggtggatataaaacacatttctcagcaaacactttcttcattttgcatcccttactgtacgtactttcttgtactgaatctttgcttgaccagggaacccacctagcccaacaagaacaatccattctacttcttggaactcactttattttccttttcccccatttcctataagataacctctaaccaatgacaatctcgacagctattcctgcaccaactgacctgaagttcactcaggtcacacccacaagcctgagcgcccagtggacaccacccaatgttcagctcactggatatcgagtgcgggtgacccccaaggagaagaccggaccaatgaaagaaatcaaccttgctcctgacagctcatccgtggttgtatcaggacttatggtaagacatgaccgttgttcattggaataaagatggagatcatctctaacacagtttctaaggtggtgaaaatataatatcataataaatctaactgttcttttcctctgcatcaaataatcttattgtaattttatatcaacggaattcctttatgttgacctaagttttccagatgactattgggacagaattttataaatagctttggattttgtgcagctcttttagatgtattgtgcttattttaaaaggttgtggggggcaatttacatatccattggttgaatgcataaatcgacttagttatgcattttctgagctctgttaccttggtaaagaatattttacagtttgtaccagtctaccttgagcctaccctcattaaaacattttaaaatccttccagacatacatgcagaaaactgctaggaacctaggggactgatgtacctcttaacataaggccaatttcaggggaaactacagaaagagggttcagagacaaaatggaacattctctttgcctctctatgataaggaaaaaattatgatttacacctgtcagatcataaaaaagaaaaatacgctaatacccacttttctcattttttttaccagcttagtttaagtatataatctatggcttacttaagcttaaccgctaagagcattttaaaattgataaatacatttatcacctgcactgtaggaatgaaattaatctaggaattttcaaggttgtgggttttgctggtttgtttattttttattttctaaccattgcatttacctaatgctgtagtgaaactccttgggtttcagttgaggacgttgctaaagctcaccatgcccttatttctctaggtggccaccaaatatgaagtgagtgtctatgctcttaaggacactttgacaagcagaccagctcagggagttgtcaccactctggagagtaagtaacaaaatgtcttcatatggacaaaccttctgtatagacaaaaattaaagaatggtaaatcagtggggttcagtggctcatgtctaaaatccaagcactttgggaagctgaggcgggagcgtcacttgaggccaggagtttgagacctacccgggcaaatagcaaggccctgtctcttaaaaaaaataaaataaataaaataaataattttttagatttatatgttaacagtggaatgagtcctaatttgaaaatcaatttgattgcctttttgacgcatgactgtcatcttttatactccttcagaaaggggtctactgacccataaaatggaatcacttcataagcttataatgttgatattatggactatgactgacatctagtttatgctctacttgttagaatttgttttcatagagctaagcttggggagaccccactggcttctgctatatcttaacaatgcatattaggccattcttgcattactataaagaaataccggagactgggtaatttctaaagaaaagaggcttaattggcccacaggccagcaggctttacaggaagcatggtgctggtatcttcttggcttctagggaggccttgggaagcttactcatggtggaaggccaagggggagcaggcacatcacatggctgtggcaaaagcaagaccgagagagagagagagttggggggggaggaccttatacatttaaatgacccagtctcttgagaactcactgtcataaagagggcaccaagccacaagggatctgcccccatgatccaaacacctctcaccaggccccacctccagcattggagattacaactcaacagagatttggacagggacaaatatccaaattatatcacagcacagtaaccattggaccaaatcaggcttagattctagtcttctgttatatcaataccttgatgtatgccttttcaaaagtcaggtaaagtgtcaaagttttatcatttataaaagagggatggcattgtacctgttgagagaaaatacaaaatacttgccgtaatattagacacacacacacacacacacacacacacactctctctctctctcacacacacatacacacacacacacacaaaattgttagctggccatgttattgtaactcctaccacacatatttttacattataatacattaataattttaatatttattgaagtatttgtagatactataaagccagccctgggaaccactggtagtatctataaagcttttcagctcttcaaaataaaatgtctgagaggtagatattttcctattttctaattacagttgacctttctctctgaatgccaaaggagataatctacacattactagttatatatttcttgaaatggatgaatttgatatataccaaggaaacgttttaaaataccaaaactttacatggatgagccaagcaggcactaatctctagctatgctcctgtgcagatgtcagcccaccaagaagggctcgtgtgacagatgctactgagaccaccatcaccattagctggagaaccaagactgagacgatcactggcttccaagttgatgccgttccagccaatggccagactccaatccagagaaccatcaagccagatgtcagaagctacaccatcacaggtcagggaactcattgcactaaccacatttgttaacaaatacccacaatgtaaacgggcttattaactgttctacgactgacactgataaaatttattttcagtgttatcatcataacccagttttagaacgttattttcatgctatgatcagaaatagttttgtcctttgaatgcctgattttgtgtaatatttgtcatggaaattgcgtaagtgtcaatcaacaagtttgatcttccatcattgtgccctttcttatttaaaaaattgtaacataaggtttaaaactaaaagaaataaaaaacagtgatgtatagatcttagcattaaaaagcatagttaatataaaagtaaacaataccacttaataaaggccaaaattgtaaccgaagaatattcaatatctgaggtcttttttagctttttaaaattgtgattccaaggctcaactattgaccatctgattacggtaaagagaaaacctcaataagtggctgacccccattctgcaagagggcctcttccaacatagcatttttgcattccagaatttactttaccagtgtccttgtctgtatcagtgattcactttcgagatatgtttcttgttaacagttaacatccatagcatgctctactttactgttcaaatgtggaccactttggtagtctatataaatatgggatgatagaagaacccagaaaaattgcaggctagcttgagaattctcctagtaaaaagcaagaactgttaaaaatcatctcttctcaaatcccaggtttacaaccaggcactgactacaagatctacctgtacaccttgaatgacaatgctcggagctcccctgtggtcatcgacgcctccactggtaactataccttctactgaggaaatgccattgacttgtatgcaatcagtttcatgaactcaaaaaacaaatgtgaggcgtatatttttgtattatagattccagagaatcttgtttccggtttacagtattctcagattcttttaagtgtgtttagaacggctcgggagaaaagtgtgggagtaattttcttggttatttgccttcttagagacttaattttgttttctttcagccattgatgcaccatccaacctgcgtttcctggccaccacacccaattccttgctggtatcatggcagccgccacgtgccaggattaccggctacatcatcaagtatgagaagcctgggtctcctcccagagaagtggtccctcggccccgccctggtgtcacagaggctactattactggtattgctgcttccatgctgtcattttccttcttactacctaggacacatgaagtccttagcaaactcccacagcgtctttgatactgtgtcatgagaatgcgaaactctgttcctgataacctcaaaaagcattctctgtgtaggagtggtagagcctaatacatcccaaaaggcatgagtgaaggaaaatgcaatttcaagactgtactaatggcatgactagactcatgttttcctttcgctgcaagtttgccagatacctgtcaattcagtcctggagaaagatatttttcaaagcatactagctgattgtgattctgtcattacactcagctctctatagatatggcaatcttgcaggacttgccagtgcaccacctgccattgaccttgttgaccactatcacaggataggtcttgaggcagagcagtcccaaccacccacattggaagaatgcctggaatggggaataagagttgtctaccttggtgggaaagactataagcctctagtattatttttgcccaagagatgaaatatttaaactatctgtattagtctgttttcatactgctataaagaggtttaattgactcacagttccgcatggctggggaggcctcagaaaatgtacaatcatggtggaaggaaaagcaggcatgtcttacatggcagcaggagagagaagcacacaggaggaacttccagatacttacaaaactatcagatcttgtgagaactcactatcatgagaacagcctgggggaaccaccccatgatccaatcacctcctctcctcaatacatggggattacaattccagatgagatttggatgcagacacagagccaaaccatatcagtctgtatagagtatcacctggactttaaaattcccacagaacatacagacattagaaggagacactggctttttagaattggggggaacaggaaaatagaagcagacatgagaggaattgaactagacacttcccacagaggctgcacaaacactggccaatctctcctacccttcacttgcctttagtttcacttttcattgatctgccactgaggactgcttggttattaggcctaagtagattcatgtatataatctgcaggactctctttcaaatttatattccagtggtggtatatgatgctgatagattttcttaaattcaaaaaggcaaataagaccacgttaaaagaataccctggaaaggccaggcgcggtggctcacgcctgtaatcccagcactttgggaggccgaggcaggcagatcacaaggtcaggagatcgagaccatcctggctaacacggtgaaaccccatctctactaaaaatacaaaaacaaaattagccaggcgtggtgatgggtgcctgtagtcccagctactcgggtggctgaggcaggagaatggctgaacctgggaagcggagcttgcagtgagccgagatagcaccactgcactccagcctgggtgacagagccagactccatctcaaaaaaaaaaaaaaaaaaaaaaaaaagaataccctggaaaagttagccaaaaaatgtctattcaggcgtcagatatgatagtaagataattagtttgcgatgcggactttatatgcaggatatttgggtgtttatggaggaaaagtgaagtcgattttaccttcaagaggccaacagccagctggagaggaagtgcctgctcccagtagcgtctgctggtgagaccgacttccacttgactagctgagcccattgacataatgtgatggttctattctcccttcaggcctggaaccgggaaccgaatatacaatttatgtcattgccctgaagaataatcagaagagcgagcccctgattggaaggaaaaagacaggtaagagtatcttgcaggtaacaaggagaaagataggacaaaactaataacaaatgagcaatcttgcaatatgaaaaggttctccatgttttgatgcatttcttgtgattttttttatctaacagcatagtgtatatattgtattctttaataggagaaataatttaacatgcactgcagagtttggttttattttttttctttactacagccactcaatataaagccttgttattcaccttttaaaaattcaaacaagatgttaaaatgtaaaagaagagctatcattgctcttcttttataccttctgttgaattttaaaatgtttccttttttaaaggagggagagaaacctctcacatttatctttatttggtttctacaacttagagctaaataatgtcttacttttgcatccagtttcagttaatttcaagaaaatgtgtattcctgatataggaaaatttcaaaaatgaacatgtgtgttttatctatttttaccatttcaaaccatgaaaaactgttgagccaaacctctgtaattctcatacttatgacactgatatgattagtctggattctacttcctacaacttgcttctcaaatttaaaaaagaaagagagaaagagaaagactgcacatttcagttccattaggtctaatttgagcagaggcagcttctacggggctcagcggtttaaagctgtgtgtatgataaattcatactaacacttttttctttctaaactataaagaaacctttgagaaaaatcctaaagatttctttctggaaaaagtgttttgtgatctcagaactgctcattttctggtggcttttatcaaattgatgaacagtcattgttgcctgaatcgattattatcattgctgctacttcctggagcttaatgcgctttgcttttttggctctaacctctctcggctagacgagcttccccaactggtaacccttccacaccccaatcttcatggaccagagatcttggatgttccttccacagttcaaaagacccctttcgtcacccaccctgggtatgacactggaaatggtattcagcttcctggcacttctggtcagcaacccagtgttgggcaacaaatgatctttgaggaacatggttttaggcggaccacaccgcccacaacggccacccccataaggcataggccaagaccatacccgccgaatgtaggtgaggaaatccaaattggtcacatccccagggaagatgtagactatcacctgtacccacacggtccgggactcaatccaaatgcctctacaggacaagaagctctctctcagacaaccatctcatgggccccattccaggacacttctgagtacatcatttcatgtcatcctgttggcactgatgaagaacccttacaggtaattaattgttctcttcacttctcatggggcagcacagaaaggaataagttaggtaactgaagtgaccagccctcgaataaaaagtggcttcatggccgggtgtgatggctcacgcctgtaatcccagcactttgggaggccgaggcaggtggatcatttgaggttaggagttcaagaccagcctggccaacatggtgaaacctcgtctcttgaaaaaaaaaaaaaaaaaaaagtggctccacttttagaacctcttagaagatggcacatttaagccctgcttttttttttttttaaatcccaatatggctctactttggaggacataccagagagtcactagcttttatttcatagagaaaatgaaactatttctcttattctcacacatttgaggttcctttttgagtaagatagatgattctagaaaagaaagatattctacctgaatttccatttgtgtgcagaagtctaaaacactacctttacgatttgtccttgaagaaccccactatctacaacatatctaaagaaaaaaaaaaacaggcgaagctgtgcatagcagctgataagtgattgattctctaaaacgtatattatttaatttgtgttgacagtatccatttttttttttccccgagatggagtcttgctctatggccctggctggagtgcagtggcgtgatctcggctcactgcaacctctgcctcccaggttcaagcaattctcctgcctcagcctcccaaatagctgggattacaggcatgtgccaccgcacccagctaatttttgtatttttagtagagacggggtttcacgatgttggccaggatggtctcgatctcctgacctcgtgatccgcccgccttggcctcccaaagtgctgggactacaagcatgagccacccactacacccggcccactgacagtatcaatttttattgtgttgttacttttagaaagtggcagaatttaaaaactgacaacactgtaggaaatttatgagcttagaaacatgagtttgaggatttgcccaactgttttaaggactccacactggggtcagatgtcacctggaggagcatgaccgtgtctcccatatagcgcagtgtccaggttttatgtgaagcaaacatggccagggcttccagagggcttatgcagacctgcgactgaagcaagatcaatggcaggccgtctctagtattgtcgagggctcctgttaactacggagcacgtaggtagattgttggcaggaaaatctggcaggaacgatggcccctatccttgttccatttctctcctcagctggttaggaccactataccctccctcttttttttttttttgttttttgttttttgtcttcctttgctttgtttaaacagtgagggttattggtaagaggagagcccgtgtcattcctcactataatgctttctctctgctttggatgtaccgataattgcagttcagggttcctggaacttctaccagtgccactctgacaggcctcaccagaggtgccacctacaacgtcatagtggaggcactgaaagaccagcagaggcataaggttcgggaagaggttgttaccgtgggcaactctggtatgtaaacacgtactatttagacacaggctcccctctgctgtacaccagagatgggcttttctgttgactgtacctttgttgccattgtctttttatctttgggatttaatgcaacacatcaacatgaaataaatgagcaactttatattaaattaatctctcccccacctcctgccatatcctgttgtcttcacaaaatgcatacgtaattgacagactctcaaatggtgatatgattatagatctggaagggatttcaaatattatttagtacaacactctgagtccttacttctgagtatctgagttgatatagggcacaggtttcctgatgtcttttcccagaccctctccatctcaccatgctgctgtcctcttgagtgattaaatactgaaacgattacctataaagaaaataccccttctgcagacatggggacagttggcttttgctcctgatataaaatgctaccaacattgtgcatttctgtctgcagagaatgttattccaatgttatttccatttttttccaatgttatttccatttttttttctgactatacaggttaaaagcttctatagaggttaaaagatcattaactcttctttgtagcacctgggaaatccttttaaatcaatagcgtgccacctggctgctcaatttgcagcagctgaaaattcaccaaggcacatgagataggggataatcaaaaccgtgaatccccaatcttccaacaggagagttctctactccacaccaacagagagtgctaagtcctgtctatgccaagtgacagattttattcctaaggccagttgtttaattttagccccttccctcatctgatagaagactgtgctactttacatgtataaattcctgtgaattaagcagttgagcatttggctggagagaggttgggaggagattattttgtgtttgttgtattacatatccacagtaatgcttatctttgccttttgtggttttactagtagaatgccacgtgaacagaattttcaagagcaaaaaggtctttgtgcttttctaagtcattttttttttttttttttaaagattccatctctttaactttagttaggatggaatttgaactcctggctcttttgagtatagaaacccctagtaacaatttaagttccttccatttttcttttaaactccttattcccagcagcagtattctacattctaaccaggttctcccagctttgagacgtctcagacttaccagttctccaaaacgctattttctttaagggtgacaccttttaaaaattaggcacctcaaatatctactgcttttgagcttttgagttttgcactgtaaaaagaaaaatacacagtgggattttaagtcaaattagtttatctaatttttagggaataatttgaagcatgctttgtttgcatagatttttttaaaataagcttttccaaatcataaagagataagatcttaggtaacatgaagagactcccttacttattcctaaatcatctatattccaagggcattttcttatttggaacagttgacctcactgataaagctgtctcaccactataataacaatgtccaaaatctaggctttctgcactattatgcaaaaattacaataataaaagtgaaaattacattataatggtatattaaaatgctaagacttttgcattataagcaaaagacagcctttaataattattctttatttagtgaacattttctaagtcttggaaaagggtcaatgttttgaattcatggccttatataatcttcacaagattccccaggaggtatagatatttttattattacgctagtattgcagatgagggaagcaaggcagagtggtattaaatagctggcccaaggtcactcaggtaccaatggagaggcatcattagtctttgcatcccactaaagttctccactagcttcaattgcctcaagatctgttccatgttctatgaagtagtttcaacagaaatggcaattatcttagaagcaagggaaaaataaaagatgggcttcctgtcgggtgcctgtgacaggtgtcacatctaaccatggttttttagagcagttaatgccttgatagaacagatgaatgcctcttaatcctcctggaattcttgttttagattaagtcattgtatacagtcattcgattttcttcttatggtccaaatcgattaataagatgtctctttttgctttttcttccttttcttcatagtcaacgaaggcttgaaccaacctacggatgactcgtgctttgacccctacacagtttcccattatgccgttggagatgagtgggaacgaatgtctgaatcaggctttaaactgttgtgccagtgcttaggctttggaagtggtcatttcagatgtgattcatctagtgagtagttgctttgtccatccacttccgtgtttgtctcctcaagttccatgcatgcactcatgtgccaaggaagcatgtttggaagacacaggttcttccaaacatgaagcaaacaagagaatactgtttgactcgaagtaatattttgcatcatagaaaaatgatgggaaattttacttgttggacattgcttcatttcaagggttgtatgccaatacaactattaattacacataagattatggtgctaatttgatttttgaaattttctgtgaaaacaaatggataaagacttttggaaccaggtctatttaagagtattagagacacagaaaaacctcaaatctcttttaatcttcagtgttgaatgagatcagaggtgaacatttagactcaaaaacagcctccttcaacataaaccaaacatgcacatatcatagtacccatgcacacacttttgcgtcacacacatagcccaggtagcttgaacgttgctagaaatatgaaagaaaaaacagataatctgcttttagatcattaaaaatcaacttgaattgataaatgtttgattttcaaattctaatacgttttaattttcaaattttttaagttaaaatgtgcctaggaaatatctattatgctttgagattaggattagaatttataaacctttcatttattctttgtgtttaggagatgtgatgattattgacaattggttcatttttataggtgttgaccgttatgcctataaataagcctcctatagacatacagaaatcatatcctgtggaattagaatataagacttggtaaaagagattttcaaagtattttacttaacttgtatacttgaaatcatttaatccagactgaagttgtaaaagccagccagtgttttcaatatagacttccatgtttgaccatctgaaaatgaaaaacactaaaaacatcacatgctgtttaggagctggaaattttaatatttgacttcaagtagatggtttttaactcctgaaatcgaactacgtttaagtttgtatgtttattacctgtttgagcacttaggtgcaattgtgggagcggggatgtcaagttcatttatgtgactctttggctcaacttacataatctttgttttgatatcacagttgtctaattattttactttgtagcttaaggcaggctgaattgttgataaaatggaaaaagtagtatattgttatataagcttctgaggtgtgttttgttgtataagccctggaggttaaaaagtcatcccttatgtatagtagttaaaggcataaaactgtgacttttagatattccacagaaccagacttatttgatgtggataataaccaatgatttagcattttgtttgcttttgttttattttatccgggttcattttttactcttcccatgtacatgaaacaggtggtggcgtgtagagatcagctgatccttgttttatggttaattgaactactttgtatccagggtttctgcaaatccaaaagtgatttttcatctaggatctattcctaacagtctactccaatcccactttagttttccacaattttaaatcttaatagtgagaattcaaatgaaagtcatttcatttgactattctgatgacatgattgtggcagaataaattgggtcttaaaatgccctagaaaatggtaaatgataaaaaataatattttaaaattcaaccaaagaaatggcccattggccaggtgtggtggctcacacctgtaatcccagcacttttggaggctgaggcgggtggatcacctgagctcacgagtttgagaccagcctacccaacatggtaaaaccccatctctacaaaaaatacaaaaaaaaaaaaaaaaaaaaaaatagcactgtggggagtgcctgtaatcccagctactcaggaggctgaggcaggataactgcatgaacccaggagatggaggttacagtgagccgagattgcaccacttcactccagtctgggcgacagagaaagactttgtctcaaaaaaaaaaaaaaaaataaaaagtaaataaataaataaaataaatggcccattataggggtttttatctttaacttgctatttttccagatcatggttctgaagaccctgtgacacgtcccagttcacctactgtcttgtgagtcagaatatacaaataactttttggtcctgactttccccacccctacaggatggtgccatgacaatggtgtgaactacaagattggagagaagtgggaccgtcagggagaaaatggccagatgatgagctgcacatgtcttgggaacggaaaaggagaattcaagtgtgaccctcgtatgtcatcacagatcatttttagtgccttattaagcattctcactttcattatcaggctgtaactctcattcacagaaatgattggagactttaggtctccttgaggagtgaacagtgggtttcttaatcttttgatttgggaaagtggagacaagcttcaaaaatgagtcatgatttaatgttattacaggacactttagcacttgtccaacctgagtattttgaccattatctgcagtaaaatgctacaaagaagctttattggtctgtagattcaacttttaaaatatgatttccatcttcccgttggaccctttccagtgtattaggtctaatttttggaagtgccaccctaagatctgtatagcagtactgctcttagggatgattcacataaatatgtggtgtttgcgctgtgatgatacaaatttaggacagaaatagaacccacccctagatcaagtctgcagtattgttctcagcttatgcgtgcatctgtcttgtgtctatatgcagatgaggcaacgtgttatgatgatgggaagacataccacgtaggagaacagtggcagaaggaatatctcggtgccatttgctcctgcacatgctttggaggccagcgggtaagactggatgtgccaggctccctacaagttagataagataaagggtgggctcctgcaaggatgtgtcgtacacacaggaggggcagagacccttcggaagtattaaaataccacatttcctgttggcatacaactgctgacatagagctctagagcagctctatgtctaccttacatgccattcattctttctattactcttagtagaaagaatgaatgaatggcatgtagagtaccaaaaacacaagtcttgagtcattcttaatagcaacacctgtcatttatatgatgttagaatcattttcctaagctccctagcatgtcagagatactatttacactgaaaaatagtgaagcagagatactattcaaattaattagtggtaaatagaatgtgtttcatttcagccggttctccccatcctgggcagcctgagaccctcccctcccctactattctcaggctgcttctatttttcagcaaagtgttaagtgcagtgtagctctaggcctccaactccattctgatggacaggtgtcccatggcaacgttgttaaatattttgaataatatctcagatgtaagaaaatgccacttcttttaacctctctcttgattcagaacagatgcttgttataggtctagcactgtgctaagtagtataggaaaaacagaggaaatgagaaatggcttggctcttaatgatatagttgaagatgttaaattagcatacatttcaaagtcaagctaattaagttctaagtgggtctgacaaatacagttctgggtaggctggaattagcaagaaagagaagcatgaactggctgaggtttacgatgactaaggtttagttgggaggggagaaagcagagagacacaccccctgggatagaaaggagctggcccaggtgggctttggtgagccaaccctctgcctgctgtcttctggtaagaaaatagatgggaagaagtggcttatggagggccttggcaacccattatttaagccagtacttctcaaccatttctaaaatatgcccagtataacaaaaaataataagcctttctctaatatgatttcaaatttcaaaatgaaattatgtgtaactcaaaagcaatggaatgtgacagccctttgttttcaacgaagacatgccctcccagcaactccccaaatcctggtgggtgaggggcatgcttcacactcaagggtgagactcattggttaatgccaaatgcattaaccaattacaggtatccaagatgcaaagaaacatgatggaaaatagtctttgggaaaattaatctggcagcaggggtgttcaggggcctgtcttggctccaccaggggcagcccatggaaactactatgatcttgtttcacccccagtgattacatggggagggaggtgctcccaattctgatggaggagaattggagattggaatttagattgaattcagtatctctctctgtctctctctctctctctctcccattaacacttacaacgactgtgattgtatgaccttagaactcagtcattctggtatgaaattgtgtgatggagaatgaatttgctgggaagttgattttggtctcacttcagcatcttctcattatttatgcacatgaaacctttcatgtgcgacacttattctattctcaagtgctaaatgaaacatttaagacaggagtggaaactgttcactttctcatatgaaagcaagattcagtgattctgtaaggaggtagtcactggtattgtgttaggtattaaggggcatatgtgcttaaacagagaaatatgtctaaaatatttaaattctaatataaaaaagaaagtgactgtattatttagggctgcattttagttgtaagaaaaaagtccaactcaagcaaaaatggcccacacaatggaacagtcccaggacccaccggcttcaggggctgctccagcaatggcgcccggactccctcttgctccgcgtgccttcccatgcactggcttcgtgcttcagcggggtctctgctgatggtgccattgatgactgacctccatgagcttgctttaccccctgccagcttaagaacagtagtgaaagagaacatgtgtgtcctcccatttccagtaaaaacttcaggcaggagcctcactggctcagcttggtcccgtttccatctcccatgccatctccggccaggtgacaggctaccatgtcactgcctagggaagtttaggaagagagtggcaaagtggtgcattagaaagaacatggccaggtcaccccacctcctgggcggcaggcccaactccaccagtggtccactgtgtgacttccctgctccctctaagcaagtcactcctctcctctgggtctctgtttccttacctataaaatgagaacgtttcttcatgtgatctcaagtcccttttaaaatcgctaggattctttgaaaaccttttctatcatctagtgcagagaacttgttgaggaagttgggattggaatgagcctcagcagatgggcaaggtttgaataggaagagaagagacatttcaggagaaagaaacaacatagagagacagatgtaggtataagatatggtaataagccaaaatgtattaagagttataaatgcatgaaatcatcatcaaagcttgcttagtgattaactgcttatattttgccagtgcatatgatgtgacatttttctttaactcaaacactaaattacgatgtcctcaggttatcataaaccccatttgacttcatgcctctactctctcagggctggcgctgtgacaactgccgcagacctgggggtgaacccagtcccgaaggcactactggccagtcctacaaccagtattctcagagataccatcagagaacaaacactgtaagtgcattagcagcacaagtgtgttccctcatactagacagtctctttctacaggtatctttcttcagaatgaaccaagtgttttaattaattaaaaaaaaaaacaactcataaatgacttaagtgaaacactgtattccataatatagtttaagttataatttatgtaactcttgaacatctcctattgcccagtatgctgctaggttcttgaaactaggaagaaatattatcctatctataagcagctgtcatgagtccccacctccccgcatttttttttctgtacactttacagtatttgccactaatttttttttccttcttcctttttaacagaatgttaattgcccaattgagtgcttcatgcctttagatgtacaggctgacagagaagattcccgagagtaaatcatctttccaatccagaggaacaagcatgtctctctgccaagatccatctaaactggagtgatgttagcagacccagcttagagttcttctttctttcttaagccctttgctctggaggaagttctccagcttcagctcaactcacagcttctccaagcatcaccctgggagtttcctgagggttttctcataaatgagggctgcacattgcctgttctgcttcgaagtattcaataccgctcagtattttaaatgaagtgattctaagatttggtttgggatcaataggaaagcatatgcagccaaccaagatgcaaatgttttgaaatgatatgaccaaaattttaagtaggaaagtcacccaaacacttctgctttcacttaagtgtctggcccgcaatactgtaggaacaagcatgatcttgttactgtgatattttaaatatccacagtactcactttttccaaatgatcctagtaattgcctagaaatatctttctcttacctgttatttatcaatttttcccagtatttttatacggaaaaaattgtattgaaaacacttagtatgcagttgataagaggaatttggtataattatggtgggtgattattttttatactgtatgtgccaaagctttactactgtggaaagacaactgttttaataaaagatttacattccacaacttgaagttcatctatttgatataagacaccttcgggggaaataattcctgtgaatattctttttcaattcagcaaacatttgaaaatctatgatgtgcaagtctaattgttgatttcagtacaagattttctaaatcagttgctacaaaaactgattggtttttgtcacttcatctcttcactaatggagatagctttacactttctgctttaatagatttaagtggaccccaatatttattaaaattgctagtttaccgttcagaagtataatagaaataatctttagttgctcttttctaaccattgtaattcttcccttcttccctccacctttccttcattgaataaacctctgttcaaagagattgcctgcaagggaaataaaaatgactaagatattaaaagtatttgaatagta

SEQ ID NO: 107 - DNA, 33806 bp, Homo sapiens
acatctggaagccacatgtcagcggcagctatataaaacggtcagaccagcaatcttagagtgacattgtttgccaaaatcccaggcagcatggacctcagtcttctctgggtacttctgcccctagtcaccatggcctggggccagtatggcgattatggatacccataccagcagtatcatgactacagcgatgatgggtgggtgaatttgaaccggcaaggcttcagctaccagtgtccccaggggcaggtgatagtggccgtgaggagcatcttcagcaagaaggaaggttctgacagacaatggaactacgcctgcatgcccacgccacagagcctcggggaacccacggagtgctggtgggaggagatcaacagggctggcatggaatggtaagggccagtccctgcactgcactggggctgggaacatctctgcatatccctcctcctgggggctgctagactctcaaggaatatcagtaaccaaagcctgggcaaatcccaccccaaacctcaccactgcatgctctgggtggagcagggctgctgctgagcggactacatgacaggacaaaaacctgggatggggagtgtctgtgggagacagactcctctgtggctctgttccttccagaagctgttctacctactctcagtttgggccaggggctggtgtaggtcggcgagaagcttgcttaccagactaccaaaagatatgtacagaaactgaaagtaataaactttatagaaattaaaactttctgtgccatcggaatggcatttttcttttttagaaatttatttttaccattttacaaaagtactggcccacagtagtttgggaacaagaaaaataaacaattgatctctcagcacggagggtttgagaactattgatttagagcaagtgaatggaaaagaggggacaaggacatttaggcaaaagaaagtggaattaaatagctgtctactgccttgattaaatgtgctctctcaattatgagtactgaggtccttctctctgcctgaatttaaagtgggttttattgctggaaaatagtttactaaagggttttggagagaggtgctgtcttcccctgactgcattctgccttaagcagtggcatggaattttttcgagcttgtacttttttgtggggtgtgattgtctcagctgggtctcagcccaggtgcttggtcaggagctcatcctagtaggcactgactgctaggctgattatttacaacagcctagatggagccagcactctaggaggcttggaggagagaacggaggaggcagtccagggaggaggaagcccacctggagggctgctgcatgtgctatctgtagagcaacccagatgtgtggcaacaagtacttagtgtagtggggattggaggggtcaagcacaaaatctggccaggtgtggtggctcacgcctgtaatcccaaacactttgggaggctggggagggaggatcacttgagatcaagagttcgagaccagcctagggaacacagccagaccctatctctacagaaaaaaaaaaattagcccggtgtagttgcatgcagcctgtggtcccagctactcaggaggctaaggtaggaggatcacttgagcccagggagtcgaggctgcagtgagccatgctcgcaccactgtattccctcctgggtggcagagcaagactctgcctcaaaaaaaaaaaaaaaagaaaatagaaaaaagaaaaagcatagaaccctgggggacacaaccagtagagaggtgatgatgggaaatccaagaggaagaaacaccgatgggtgggggagccaggaaagagagcgggcctttaagtaatgacaacagctaccatttattgagtgcttaccctgagcaggctccatgctaagtgctttatgtggatcatctcgtgtaatgctcaaaacaagggtatatcccatttataggtagacaaactgcagtctagagatccagtatttcctcggctagaaagctggggtttggatccacagagtctttgcttcaaagagtttgtactttgccacagtgacgggctcctgagaggctgctgcctccacccagagtgggctcccacccgacagctgactctgtcagcagagccagtgccacaggaccagattcagggcagttcttcctcctggagagggtggggacctgcaagaccacagcagaagcccagccccagagggatgatccctacttggttaccaggactgtggaggggctcagccggactgtagaaggggtggggagaggactcacacaggcagcagcaggtgagggtgccggggctgtggaggctgcttggacagcctttgtgggccattctcatccacccccatggcctctggtgagcagatttagttattcaaaaccccttctgacagatgctgattcagagaccaggctcaccttgattgttgtctccatgactcctcacagccaggcccactgcctaatgtggagcatggcaatgacctaattacaactgtccctccagtcctcacctctcaggagcactatcgcatgggtgcgactcctttctaacagccgttttttgtgccacagtcaagcagcactcagccatggttccccaagccatagaggaagagccctaggctctgaatcaggaggcctgggtctggatcctggttctaatgacttgtggtgtgaccttggcccagacgctcagccctccagtctcccgcctcatttggaaagtgagcagtcaggctgcatgatctctgaaggctccacagagctgtggctcacccctgaaaacactcttggctttttcttgcattctgttgatctttgtgttcatccctgctagagagagaagccaaatgatgtttagttttaaacttgccaactgtgactggtttgtcatgaactcccaaactatttgaagaaaagcaaaagaggaagaaggtgaaataacatgattttatttggcccatgggagtcaagggaaaagctgataggcgagatacctcttccacctcctcttactcggcatttttgggtgtgcagtgtctagtaattttggtttcctttcctccttccaccctctgttgcctccttctccccgtctactaatcacagggttgaaaactcacaaacatgcaaaacaacttctttacaataagatccagctgccccaggactgacacgaattaccctggaagcacttttaaaaatgattatgcctttgagttcagcctccagtctcagtgaaaaatctgtaaggaaagaaattgcttatgggctggggagctattacatctgacgttggctacaggcttagtctgttctcagggaacagttgttgatggttttgtgcagttgggctgccttgtataaccaaattagctttcaggtttattttaaaagaggggaggagtctcgaatataggcttgacaatagcacataggatctgctaaaaagaaaatctttctaatcaaagtgccatctttaaaaggtgttgccatcatagctgagtggtctgtggtgctgccattgatcacagtttctctgttgaaaatcacctcttcaagtgccggcttctgaagtttggatgatggtctctggcactaacaactaccaggaggccttacctgggtccccatgagtggtatttcaccatcccagggcatgcctaggttgttctcagggaatctgctctaacttgggtcagcacaggctgtagggcactgggtcctgtgtggaataagatgaaggtgaaattttctagtgagattgagctactgtgtagcggaaggagccctgggcttggatgcaggaaacctggattcacagctcctgcttgtatctgtgacattcggtatctcattctggcaaaaaagaaagagaagaaagaaagaaagagagagagagaaggaagggagggagggaggaaggaaggattgaaggaaggaaggaaagaaggaaggaagaaaggaagggaaagagaaaggaaaggaaaggaaaggaaaggaaaggaaaggaatggaaaggaaagaaaagcaaaggaagaaaaaggaaggtgtgactcccacctcacaagctgctacttgtgttactgtgatacttgtaggataaagtataagaaaactctaaagcaaattgaagtctaaaacaaatgcctagcacatcatgggcaggtagtaaaagtttagtgaatctgaaattgatgtggctgatgttgggcaagccagctttccacggagtctgagttcagaggaaaagtggtccatttattggtatctactttttaccccgggcttcaaagaatctcaaggagaagttttggagtggcagtttgtgttagagctgagtttatgaattcaatgacaagccacagactggagaagaggagaaagaatctatgcaacagggctatggcagcatcgaggtgcatttgaaggtggagaggttgggtgggaactccgttttccatggtcggactatttccctaatctaagcaagaccaagcctcagtgtagttcagggcagtcgtcctgagtcatggttctgagtattgagtactcacagggcccacttcctcggggatgctttccaagaccacctcctctccccacacatctcgctgtctccactccctcagcctgctttgtttcctacaatgcccttgtcactacctgattggcatttgtttcttgttttgtctccctcactaaaatataagcttcatgaacacaggggctttgtctcattcaccactgtatccccagtgcctagacaagtgctggtacataacaggccctcaatacatatgcagtgaaagaccaaatcagcagtccaaaccccagccagtgtccccacggccctccgcaaggaggcctgcaggttttcccacaggggaaccattttgcttatgtctttgattcccaatattccagtgtctatagtaggggttccaactgtattgttcacatctcattttgatttattgcatttaccaacatgcaggatggtctttcaagatttcttaaggatcgctaaaacatgcacagaggatggctgacacactttgccgccgcagaatgaagtttttatcaggttttcattctctcaataatcttaaggtctcgatcaatttcaaaaattgaaagtaaactctttatttcaaaagccataagggctaaatgctgcacagtaacctatcctggtttgacatttgtggaagaactgatgaaatcagtttggtgttataccaaggttaatttcttagcatttcttagcattcctagacactctagagttatgaaaattaacattagaggaacctgggtgaagagtatacatgaattttgtgtgctgtctttacaagcattctgtaaatctgaaattacttcaaaataaaatttaaaaaaataaatataaggatgcagcacaaatatagtacaacagaatcgtggaattccagcactggagggggtcttgggcacaatctagagcaacctccttacctcacagaataggaataaaggccatgagactgaagcaattaaaaactgaataaaaacattgctgtcaggttaggaactgtcatcctctttttacaaaagtagatataaatatcagtagaaggggagagatgggtcatggagcaattctgtttggaattaggagagaaatccataactttacataagtataggttctatggccctaaccctgatctacgtggtgatttatgatttatagagtattcctcatttatatgttcatttgtttattcattcactaccaaatgcttattagcacaaactttcccaggccccaggaagatggagatgaataacatacagtctatgcccatgagttattcaaaagctaatattgtttgatcttcacaacagtattggaatccaggtgtttcacacatgaggaggttgcccttgcatggctagcagatggcagacggaggacctgagccagccagcctgattccacagtgctgtgggtgatatgaaatgctgatgttatttttgttcctggataaagccatagtgagtgctgacctaaaaaagatatcaaatccacctaaggatgacttctgagggcaagaaggctgagtgtgggagaatagggttatgacagatctaggattcttgccaactttccatctaggtcactctcctaagtgctaggaatcaattgtctgggggaacttgagctctgcaaaaatggttgttggctgctcttgtaaggatggcaaaagctccctcctcccaggaggggatttgcttctgtctgggaacctgcaggacacaatcttctcaatcaataagagatttctgcagagttaagatatcgtgtgtgtgtgtgtgtgtgtgtgtgtgtgtgtgtttctttgagggatcttgaagtattgaaaagttaatgaagtttagagtcagaacaattctcaaaatgcagccccactgaccccactactacctttactcaagtcgtctcaactccgaaatactcagctttcacaactaaaacacacctccctagaactgttgttgtgagaattaaataagataatatatgtacattaacttgtgtccttaggggaattacttaccttctctaaacctaagtttccttatacgtaaaatggtgatcgtggtgagaagctcattatttgaacccattttataggattgttttgataattaaaataattaatgcacgcatagtgctaagcacaatgcctgcacattgcaagtccttgataaaggttatttattattactttatcatgactactctgtgtaaactgagactcatggagacaagtatcacacagttggtaaattacaaagctggagttgaaaaccaaattgctagattacagagcctctgaaatatatcattttgcttttggaacatataatttaatcacagtctataaatattatgtgtacattataagtgtcttgaatatttattacattttaatagacacggagatagcattagatctcttgtttaaaaatattataattgatattcataaactcacgtcaaatttactgtgatgctaatgtagctcatgcaattcctgtgtgacctggaattgctctcaggacataaatgcatctcacaagataatctagatcttctcagaggccttaggggaagcctctcctgcctgtatttttccaaaaaaacctgaggaatttgtatttttggaggcattctcgctctgtcctgtgctaggtctttctatccagagatgctgttctgcaggtcatttctgcttcactgttaaaaccttgtagacagactagcagacttaaaacctggacatggagaagacagcagaattcttacccagatgcaggcaggaagagagcagaatgtgtgcaacttaacactatttaaagagactgttcatatccccaccatggtggcaggaggatgagcagtaaacggtgcagtgttcaaaaactttgcattgtagccccatgaggctactcagtgacagtatgtgttaggtgaaatgtgtaatggtgatatcaacatgtcacaaggaaggaaagttagtatgatttggaattgtcaagaaaggaaggatctttgaaggaggagaggcttggtattgccttttgtgctctgatatgtgctttctgaggctcctctcagtgtctaattggagaagttcaatcctgacaatttctaatgtaggctccaatatttactgaaagtgatgtttcgtgactaggatgtagcctgtctttctatcagattacaggtacttttatcatcatggtagtaataactatgacttcccctgcctttcaattatatacgttgtgccaggttctatgctacacttgatatatagcatctctttagtttttgtgtaatactgtcaggttaagaactgtcatcctagttttacagaagtaggtataaatatcagcagaaggggagagatgggtcatggaacaattctgtttggaattagcagagaaatccagaactttgaaggcttcttttactgggcaaacttgcccccaactgtgtttgtctctgtcccttgccacttcactgctccactgtccccaaccactctcctatttctctgctcctctgtctttggtaccagtctacttatttccagtatctgtattatcatagtgtctgcttatcagttacagtgtctggtaattctgcctgtccaatgtcatagtgtttacttatcagtaccagtcttctgaagagattccagaccaagtgcagcatcaggtatagagtaagttctagtgaatatttgtcaaaagacttaatgaacattctaaaattctgtgggcctttttataaatgcctgatagcaactcaaagaattattctggggaaaatagaattaacaaaaatcaaagctttactctaaaagaaagaaactcttttggtactatttaagacctcatccacctttggggcgggaaagaaatttgggagtgttaaggatgctgtgccacatggagtgagccacttgtctagatcatgggcaaaacttctcatagtccatctctgcagtggggttggaaactggctaacagcccttgaaacacctgtgtgtctgtgaagctgggaaaaaaaagaccagcacaaccagcccatctattatctatttaatgaaattttgagagttcttgaccaagatggtgctgcttccttttaccttgttcatcacttgactcaaccccacaccacaccacctaaagtccaaacttcttagcaagtccaacttctaaaattgtatagaggggttcaccaacaaaaccagacactcacacaccttgcaaatgctctgtaattctgcctgtccaatagctttggacttggtaaagaatgcagacaacaagaagaagtcctgtccagcataccaatcagagctgtgggaccatctcgaagagatttattatatttcttgagagctcatgaacatgagctttgacctcagatgaatctgagttgggtcctggctcttccagttactctcttggccgagagttttgtaggcattatcactgactccacacagtgccttaggtgaggctccacaaagcatgtaaaggtcagggctaggactagaactcatgtctgctgattcctcaacaagggctctttcccctgcaccccactgctgttatgttttactattgcagatacaggagaaagtcttccgttttagctttcagggtgatgaccctgagataaatcattttcagaaagtccactttctcagaataggttcacaaatgtgttttcagaggaggagtaattaccttgtgactttccttctagaaagcttccagtttcagatggagcagggctaacaatactccagtttctgaaactgaaattgaacctcagccttcaaagaggtggtaagaaaaaaaaaaagtatgtcttctcagatgggaaggagagtcttgtaagtaaggtaccagtgccctcctgctctaaggaaatagtcttatttccttagagctgcggtcatgttatacaattcaccaggatattagccatcgtattggtgactgttaggaactcctcactcacatccatgaaggggcctgaaactccctccaagtagtttccctccaagcggaatagagcattgagccactgccctgttctccaggccattcaggagcaacaaccaggtgctgtgaagtgagtcagagcattagtcatttgaccgctacccatctcttttgaaattgagtttgagtaactttagcaatgcaatccctgacagttcccccagtcctgttccatttagaagttgcctctcttctcacctagctctgtgtttgtaatcctgcagctatggccagtgtttaggtgagtcttgttaaataaggagctttgttaaaagtgaaaatgagaggaatggaggagaggaatgcccaaagctatatttattttgccccctcatcatggagctgcagggagagaacggaagcaagaaaagggattgctcacccaagatccatgtaaactacttggagggagtttcagggcccttaatggaattgagtgatgagctcttaaaagtcaattctgcctccaataatgggacatagtcgggtcactcattcggtccctcattcttctattaaacatttgctggacaacaatgtcagacactgcatggaatactacttcctgagagtggtaaggcatactaaagtacctgtgctccaaagtgggtggctaagacatccaacctcattgagctttgttttagggaaacagcagctcagggagggcctatgaatccaccagtgttttactgattagagacaggggagccaagggacagcttttacaaagtagactcataattactgtgtagactaaacataagtataatgacactaataagcaatttattaatcccaggaattttacatgcgttgtcttatttggtcttcacgataactttaatacatatgtgctattattatgcccattttacagatgaggaaactgaggctattagagggcacgaaacccgcccagatgatacagctaagaacagtggagccatccagcagcatagccaatgctcttggccactctactatctgctccccacagtgtgaaaaggtacccccacaaagatccggctctggaaggaatgctttcacataccaaactcctgaacaggctgactctaccaaaatgtgaaggcaatcaaaccaaagccggaggaggagggttatgtttggttatctaactttcactatatgttcttaggctctgagtctgtagggtccaaataatcttcacagggcagagttatctgaggtggtgtgtgagaaagtgacacacacttcccgtacaggcactggggccagcagcctggccaacagctggcggggaatttgtggaacttggattgccttcagaactggtactccatgaaacagttcggcttatcttcctacatttatttttacttaggggaacttacccccatgggagctctgtcccctataggggtctgagtacagaagacaagccaaaacaatggaacaacaactccgtggaaaccacagcccagctcagttctgaaagggctttgttttagaggaaggcagcattttagtgatggtaggagaacaggtcacagagagcactagcttatggcaaccttctctttttggacacatatgagttttgcttatgattcttagagcttcatattgaaattacctctcacctactttactaagaattaggatagaatagaacaccctggtagatcagcccctaaagctacctttccaccatatcatgagcctagtccattccactcatatagcttgctgaagtatgccaggcatttacaaagtgattagtatactcctgatgagatgcgagcaatggtagaatgaagaaggctacatcagtcatatgcagaaaactgaaactggaccccttccttacaccttatacaaaaattaactcaagattaattaaagacttaaaggtaaaaacccaaaaccataaaaaccccagaagaaaacctagacaacaccattcaggacacaggcatggacaaagacttcataataaaaaacaccaaaagcaattgcaacaaaagctaaaattgacaaatgggatctaattgaactaaagagcatgtgcataccaaaaggaactatcatcagagtgaacaggcaacctactgaatgggagaatatttttgcaaactacccatctgacaaaggtctaacatccagaatctacaaggaaattaaacaaatttacaagaaaagaagaaacaatcccatcaaaaagtggacaaagtatatgaccagacacttctcaaaagaagacatttatgtggccaacaaacatatgaaaaaaagctcaacctcactgatcattagagaaatgcaaatcaaaaccacaataagataccatctcatgccagtcaaaatggtgtttattaaaaagccaagaaccaacagatgctggcgaggctgtgaagaaataggaattcttttacactgttggtcggaatgtaaattagttcaaccattgtagaaggcaatgtggtgattcctcaaggatctagaacaagaaataccatttgacccaacaatcccattaatgggtatatacccaaaggactataaattattctactgtaaagacacatgcacaggtatgtttactgcagcactatttgcaataacaaagacatggaaccaacccaaatgcccatccgtgatagactggataaagcaaatgtggtacatatacaccatggaatactatgtagccataaaaatgaatgagatcatgtcctttgcagggacatggatgaagctagaagccatcatcctcagcaaactaacacaggaacagaaaaccaaacagtgaatgctctcactcataagtggaagttgaacaatgagaacacattgacacagggaggggaacaacacacactgggaccagtcgggggtagagtgtgaggagagggagagcattaggacaaatagctaatgcatgcgggccttaaaacctagatgacaggttgataggtgcagcaaaccacaatggcacacatatacctatgtaataaacctgtacattctgtacttgtatcccggaacttaaagtaaaataaaagaaaattgtaaaacctagatacatgtataataaactacacagttgcacataccaaaaaaaaaaagctagatcatcaaagagccataggtctcaatttacaccttaacctgcattactgagcccctatagctgagttttctagtctgccagaacttcttacaagtcctgggaacagggaattcaagctaatttacatggttgaccgaataccgagcccatctctcaattcttctcacaacataatagcaaagtgattgatacagaacagtagtagagtatgagatgtttaataaatgaatgaataaataaataaataaataaatgcatatttgaattatatacattaggtgaataaatgaataacaagtaataaataataaatttaaaaggacggatgatttctgatgacagacaagtaatatatttaatatctaattttgttagatctgcaagttcattttcagcaatggaaaagaataaatgaaatccacttgttgataatgttacaatttgtgtgtcaacaaggcctctctcaccagtcagcacacggtacttactttatgcattatattttctgaaaacttatcttcccatgaaatacaaggttgcattccagcagctgtctggccatgcacatagacaactgcctgctctggctctgcccactcataagaggggatagaccaatggctgggatggtgggaaatgcaaagaaggagaggtaactgaagaactattttggaagggtttgtgaaagagctcatgctataaggtggaaatccactggatttcatcaaagggccatggctcaccatacccatctgggctttgcatgctgtgtgggggcagaacaaatgatcatccttgtgctcaatttccagggctctgctgttaagcagaagaaatgtttatttgaaattcgtcaatacattgtgcttctctttgtcttctttttattttaaattccagtaaaatgaattataatatcttttattttaaatgacatgcataatacaatcttgaatttgtaaaattctagatgtaaaattctagatcctggataagtagcaagaacagtggaaatgccctgactgtgtagagcttatggtcttgtgggtggtggaaagattcctggataagtagcaagaacagtggaaatccactgtggtcaggtagaaaatagtgttatcatcacagcaaaaagtgggaagcctgaagacgccataggaattgggcccgggaatgggagaaaatcatactagagatggaacaaaggaagaaatgattgtactattctaagtcaatgtttagttcaaaaggtgctgtgaagaccagcagcagcacaggtagaatgaaagagcaaaaattatttcttgtctgtggactggagtggagcggttatatatttgaagaattaggactaagcagctaggacaggaaagggatctttagagggggtttgaggcattcagttggcctgttgcaactctgtaaggactgcctccacagccaggattcttggtggccaccaggaatagaattctgagaaaaacatgccatggctgtgtagagcttatggtcttgtgggtggtagaaagattcctggataagtaggaagaatctgggttgtggtcccagctttcctactgggctgccctgggcacattcaccatgcccatctgggctttgcatgctgtgcaggggcagaacgaatgatcatccttgtgctcaatttccagggctcttctcttaggcagaagaaatgtttatttgaaattcatcaatacgttgtgcttctctttgtcttctttttattttaaattccagtaaaatgaattataataccttttattttaaatggcatgaataatacaatctcgaatttgtaaaattctagatgtaaaattctagatccacccatttatgcaggcttccatctaacaatatatattgaaagaggtatgacaggggcagtgttccctaaattttgttcagttagaaaattctgagtcacttaaattttaatggaggggctatgttatttctacaaatataataaagactattatttgcataaaatggaataaattgttaagaatctaggtcagagaaagagtgtgtaactgtggcagtggggtcttgggaaggggtctgtgtatgtgtcactgttcttaggttcctggggttgtcttctcttcaggtaccagacgtgctccaacaatgggctggtggcaggattccagagccgctacttcgagtcagtgctggatcgggagtggcagttttactgttgtcgctacagcaagaggtgcccatattcctgctggtgagtctggcagccgaccaaaccctcatgactcctggggtgggagaggcacctaggaagtgctctagcttcaggtaagcttgagggtcacacacaagcctggaaggcagcgctggcatatagacaagaatgaatgaatgacttaggaggatgttcccgccaagagggatctttcaggttatccaaccccccacatccttcttttggcagaaaaggaaacagaaccatagagccggcactgactggcccaaagtcacccacctactctgtgggaatgccaagtcttaagcttaggcctaatgactcccatcccagtgctgttctccttctccccaacttctggtaacttctcatcatatccaaggctgcagggcctatttgggaacctagtttcctgtagtctttctctgggagaaaccaatcctctcatgggtcagagtctagtacatagttatagacagaaaaaataaaatattaaaaaattaaaaaattaaaaaaaaagattgtgctgttttctggatccatttggaattccagcctctgatgttttgtttctttccctatccctgggctcatgccgaatatctcctgacctagccttccaattgactaggagaatgtgtatattgtcatttgccctgatgacttacactgggtgttgataacacaaccggcccaggtttttttaatctgaaaatgagccaggcatttctgccttgggcaaggggatccagaagtgtcaacatgtgaaggttggctccctcaagtgattgatctctctacagtttgatgcttgcaaggacagcttcacaggtcatgcttattctctgcaatcagacagcttactccacagatgcccagtggcacacagtatctctagggatacaaagccccaaaagcttaacgtttttctttttaaagtaaggaccgatagtaaattcagagctcaaagtcacctgtcactgtatgatggagcagaaacctcctctagttcttcaaaatcgcttccataaagcagcttttactcctctacagtgggtgaacaggcctggcaaaggattacgatgccactgggataggtcctgaaccaaagacctaaagatctcttgcagtggaggaggtagaaggagcaccagtttgggcaaaaagaaacttgagtttcagtctctgtgttggcctttcctcacttccctcccttctttcccctttccccttctcccctccctctcataactctgcaggctcaagcacatcacctaaaatgatgaccaccttttttgagtctccaagatctttaagactctgatgaaaactatagaccttgtcttcaggggggaaaatgcacttagcatgttaatacaatagtttgcagagaatttcgggagtccttaaactccctgaaggccattcatgaacacactgccaagaacccctggatcataagttgaaattccaaggactagaagatctttcaggttgtgttgaaccctaaaaatgtcttaattccaaagacacttttggaaaagatgatccagatgccagaactgttttgagaggatgaaggaagttccaaagacgagtgcgccctaatgaaaggggagagtaggtaggagcttggcctccacaaatctctcattcctggtctattaacagaatggcacttcccacaaggaaaccagcctccctttgttgcaaagcattaaaagccagttaaaatgtatgtaaattacctgaaagagcaagcaaaacctaatactcagtcagtgaatttatttactacattagtataactttccctgaatcagactccaaaggaacacatcagggctggggtatgctgggtggccaggaggagtgggttcaggagcaggggaaagagtgaggaggtgaggaggtagccctgcacgggctgcagtggggaggaaggggaacatggacagcctaggggcagctggaggcctggatgttggtggctctgtctctctgcccttcgtagatgcctctgtcacagcactttatgcattttaccacctgtgtacagttgctcctctctacctggacttccagtgtctggaggatatggggccactcactgatctttgtattttcaatgcccagtatagtgcttggaacatagtgtcttcttaacaactgttgaacaaatatccacattaataattgtggagggtgtatataatgtgaagtggcccagaaaatataattctcttacataaaattttttgttctctcccccatccctccacttctgcccagaatataagctctacacaagcagagatctttgtgctgacatatgccaagccctataaataatgacaggcacataacatttgtttggatgaaggaatgacttcaggctactttttgttatgagcattaaataagataatatatttctggccttgccactgtctatgatcacacagagctgacctgtcttgaaacagagtccccttcaccctcccagatgcaggagagacccagcctcctcaccaactaacaggacattcaaaggcaaactctgcccaggaacaacctagcaggtgtcaggtcattgcaggaagcagaacttgagagcggggttggttatgcagaggaacaagacatgtgaccagttggacagtctgttgttagatgtactaactcattcttccccaggcagagaggagtaagctgaggcagcaacattcctcatcacagcaaggctcgaggtctctgcagagatgagtgggagagcctgctgtgtctgtggccatgccatcatggttggctggcccctgcccaaacagaacaacaacagatagtgggcttgggcctcaaggctttgggtgaccaggcaggcaaggagctaaggctcactggttttagaaaatttgtcaaggccgggcatggtggctcacacttgtaatcccagcactttgggaggccgaagtgggcagatcacaaggtcaggagatcgagaccatgctggctaacatgatgaaaccccgttctctactaaaaatacaaaaaaaaaaaaaaattagccaggcttggtggcaggcacctgtagtccctgctactcaggaggctgaggcaggagaatggcatgaacccaggaggtggagctcgcagtgagccgagatcacgccactgcactccagcctgggcgacagagcaagactctgactcaaaaaaaaagaagaagaagaaaaaaaaaagcaaagttgtcaaacagaagaaatagggggtggatgaaggtaagtgtgagagaaagggataaacatctaaattttcctggaattcccatattccgtggatctgtgggatctgtgttaacactctgagcattgcttcttgaagcttatcctgtctgtttatttgaatgctgagacctgaaaaagacaggtctttgtgtttccagttccaccgttgttttaatgatgccccagatttccagtggtcacctggagactggttccaggatacttctgcttccccaagaatgctaggtatcgttcctctcacatactttagaaaggcttctcaagctcccttagatgcaattcaccagctaagatgctaaaaatgtaatgatcatatagacatatatgtaggaacaaagtctcaatgttaaagattgatagataaagatgagcaattttgagttgccagagatattcatgtctctgctcacaaagtttacccaaagccttgatctgcaatgactttgccactctgaacccaccccaacccccataccctttacccttccttaccccatcctaccatccagacatgttgctgttggtctgtggagccaaaaggtggggaaagtacagagaattaatccaaaaggcatgacaagtcaactttgaaacaagtcccactaaggtgtggttccacctgctggttctatttctgaaggcatggtgttagagctgagagctatcacggtcaccaaataaaatggtattttttcaaagaaaacattggagaagcagcagaacaagattcaagtgtgcaccatggtacacagtgtatgactcactatcccgctggtgtgtctagacattttagtggcatctttaaattgcctgagtcatgatgttgtattatatgtctttctaaatgcctccagggcataaattaggtcttattttttcaacatctccaggatattacccagcacaaaatagactcttaataaatgtgtcagatgaataactgaatgttgcaagcccctaggaacagtaacaatggtgaaacctgacattgatgtgatgatgttttatagttgacaaagacttctttcatgtacattattttatttgatccttttaacagccttacagagtgaagtgagaactctttttcctgcaccttcccacagtgaaatgctgataaccctcttatctgaaaccttcccttacatgactttaattagcttgaattacctcccagggaactggacccatgtgggtgggaacgacatttttccccttccctctttgaaaggcattcttcagcacgcagcctgacaccgtatgaactagctaagtgaatatctagcgcctgcgtttgtgagcacttagggattcagaaatatcatcactctgggctggaaaaaacaaatcatccaaccaactcccaaatgagtatgagatttatttgtttggtgggaaccaaggtgctgctctcgtttcagcttgtgcggtttctctttggatattacagcctcactggactctggcaagaaagcaaattcctgagagatgtggacatgccattaggaaatggtctccactggattggatgaatagtgaattttatagatatttatttagatatgaaaattctaattcttagtctagtggtctgcaaaccacaaacacatgtcactgaagttgccacaaccctttagacattgtttgtcataatctctcttctccaaacagctcagcagctgcaggctgcacaccagactgtctactgtccaggcggagactctgtgtcccaggatctgatggttgtgaatcattttcttttccaaatggctcttctccagacccatggcctttcattaggttcattggataatatcttttgactgtaaaataatgcatccatttaggtaacctttacttttctcttcaaccctgatattctgtctctcagactttgcattctccactgcctacttccccactctctgtgtgcaagtcataagccagagagtgctttttttaaattcctgtatagctctagttaacatcagttgattagaacattcttatctctcccaccccaaagcacccagtcaaagctaatctttaattcttagcctctttgttcagatgttaatacaagatagggagtgtttgcatgttcactcctgtaatgctgttttagggacatgaacaatctcacaggcctctgcattgctgtgcctgtcatatgccacctgtgcccagacagcctcctgcaattcagctcccagaggcctggtaagaagagcagcttccattaggtatatctcctaatgttagttaacaggtgcagcacaccaacctggcgcatgtatacatatgtaacaaactgcacattgtgcacatgtaccctagaacttaaagtaaaataaaaaaataaaaatgaagagcagcttccatactggtcctctgcgcaagctggaagctattactatagagatggacatacttaagttttgaggaaattggactagatgtctcaatttaaaggaacttatattgggtttagatgctctgcgccctactaaaaccattgccttccattgcatgatgtacatagcactcattgtgcagacagcagcctctctgaacttgagcaaaatctatcatccctttcatctgctggaatggtttccataattattgtgccatatttaaaatgtagacatgtacaattggcactccatatctggggttccctatccaagaattcaaccaactttgaatcaaaaatattcagaaaaaaacaataaaaataaaaataacaatacaacaataaaaaatgatacaaatacaaaaccatatagtataataactactcacatagcatttgcattatcttaggtattatacgtaatctagaggtgatttaaagtaaacaggaggatattcataggttatgtgcaaatgctacaccattttagatcaaggacttgagtttctgaaaattttggtatccatgggggtcctggaatcaatcccctgcagatgccactgatgactgttgtattagtccattctcacactgctaataaagacatacccgagactgggtaacttaacaaaggaaacagtttaattgactcacagttccacagggctggggaggcctcaggaaacttacaaccatggcagaaggagaagcaaacatgtccttcacatgatggcaggaaaaaatgccaagcaaaagggggaaaagccccttataaaaccatcagatctcgtgagaactcactcacgatcatgagaacagcatgagagtgaccgtcctcttgattaaattacttcccactgggtctcttccatgacatgtggggattatggaaaccacaattcaaggtgacatttggttggggacacagagccaaaccatatcgactgtatttggtgcctgcattataggtgatacctctctccttatgttcaaacttcaaaagcagaaatatcatagatgtgtctggctaagtattggttaacccaaggccagctacttagaacaaagtaaacctctcagttacaaaccaaatctgatgctttattctatctagtctgcttccctctactataatagattctagaggcaatcattcttacttctatttattaattcacttaagcagtcaatgaatgtgaatggatatgaaataataacaattcataggctttgggtgagaccctactaatgataatgatgataataataatatttatttattgacacttaccacgtgttcctgtgttactgcatttaatcctcacacacaaaaattatgatactatcatacagatgagggaactgagctatagaagttgtggctcccttcaaagttccaaacttgactcaaccagtctatctgcctccaaatcccatgctctttgcatagtactgagctgtctctagatgaggaataagacttctacaggtgaaatattacataatagcacagtaggcatctggtagaaaacagagaataaaactattttaattggaggggagctgttgaaggtcaagtagcccccactgacatgcaggcccagggtgaccaccacataatgtggctaatgaaaatcaacacgagtcaaagtgaatgtgcttactgactagccctgggcttggacagtgagttagaaactcagttccaagagagcaatttggaaagtgttcagggactttcctctactcatttaagctacagatatccctggaactgttattccctcgtgttgtgatacatgtctgaaatgtttgaaatgtaaagtcccaaaatgccataaaaggacagacatggacatttgtttttatttcacacacctcagagcccctgggttcagattttctgtgcagagaagggcacttgggtgactaccagaggtcccgcttggccaatccccagctcttgtgggaagaagcctggggattgttctctgtggctgttttcctttacacataactccatttggggtttattttttctgtctttacaaaactaattcaaagggggtctgatgtagctcctaataaagacaaactaaattaatctgaaatatgttcattccttatagcttacttggaaaagcattatgcaagaggattgatcatgaacagactggctttatttaacaaacttctcaatgatttgactgtcagaaagggacatctttttagctgaatatataaaacgtaagccaacctcaacacaccaaatccgcaaatgttgagtttctcctccaaacccacctctgaaccagatcataaaagcatatttgattccatgcaccagtgatccctcaaagagctcactatattggccatcatgatgttatacagtattctattatcttgctaaatatatagtgctgatgtattagtccattttcatgttgctgataaagacatacccgagactgggcaatttacaaaagaaagaggtttaatggagaactcacagttccatggctgaggaagcctcacaatcatggtggaaggcaaggaggagcaagccacatcttatgtggatggcagcaggcagaaagagagcttgtgcagggaaactctcatttttaaaaccatcagctctcatgtgacttattcactagtatgagaacaacacaggaaagacctgcccaaaggttcaattacctcccactggatccctctcacaacatctgagaattcaaaatgagatttgggtgagacacagccaaactgtatcagctgacatgtcacaggacatttgaatgggatatttaaagtaatgtgctaattgagtggtagagaaatagaagaaaaacagaattcaatattgaatgaccaacagaagcttctctaaaatgttgtttgagcataagctgggctataaaagatcatttggaagacattctaattttattcttattttttaaaaagctgaagtatggcttcctcaggtacccgttctgatctgttcatatgtaaatgctggggtttttttccagtttttatggtagggagtctgtggtgtgtgcttttctggtgtccccacaaagtgggccaaggttggggatatgatgtttcctgaccatgagatgaagctgtatctgttcatgtgcacatcaattggagggaaagtcctgaaagaggagcttccaggtgacaccgactaatccagttgccctaatttccccaagtgaaacagctgtaacaaacacatctcagtgctatgaagtttgactttcatagaagaaaagtgtctagctccgaataaggtctcgtagaggtgggttttcacaaaaccttacgctgagtcactttatgtcaaggaatagattgaaaatctttactttaactattaaaaacctaataagttctcaacccaacctctgacaatgaataaaattggccactgtatataactagattgtatctctatttccctttctaaaatggatgtgagagcgtatacctggactcagctctgcaatatgtctgttcttgtggcaacggagccgagacatctatcagcagcagctcagtctatgatattgtatcatagcaaacattcattgagtccagttggatctgttaataattttagagcttcaagaatcttagatgagaaaaatcctatatcaatcttaaaattgtcttcagttcgaactgatttccctcagctcataagtaaaatattattaatttttttaccatcagcttcagctgacacaagagttgtgcaagtggctttatgttatcaagttttttcttagctttggaacaactctctgtctttcatcttgacagcagaaaaagtgctgtgaagtgagaaactgtaccacaagagtcattcatctgaaagtgcgcatgcacacacacacacacaccccacacacacaccagtagttttgctttttttgttgttgttgttgtttgagacggagtctcgctctgtcgcccgggctggagtgcagtggcgcgatctcagctcactgcaagctccgcctcccgggttcacgccattctcctgcacagcagtagtttttattaaaaattaagtaatagctaaaattgaataaatctattcaaacactttactttaggggaaaggagaaaataaggcttcccatagaaatgtttgaaaagtagactcatttcaataaaggcatcttcctgacctgcgctcttcttcatcttgccaagctgaaggtttgtttgattgttttaattggtctaggaatgtatggcaatgctcagtatgaagtgtgtttttccaaaaaactgcttaaagtgacctagtaattcacaaggaattcacaaggaagctgcaaccacaccgaactcttccccgacctacactcgcaaagcccagtgtcacagcttaggaaaccctgatcattctgcttccttgtagcctcttttaatttcctgaaaagtccctatgccctgtctcagtgtctagttctgaacgtttaaattcttttttctctctaaggagctattactgggctttcacttattaggacactttgtgcgcgtgtgtgtgtgtgcgcgtgcacatgcagtgtcatcaagcgctaaatgcagccacatatatctggtttgaaaatacagaacacagcatcctgggccacattgactcaatagttcttcctatggatggtgtttgggaggttcactttctaccagtgatttgggtcatttctcccttggtatttttatttcataaagtaggagagatttccatcgatatccaacctccttccctctcctcctttacccaggtttctctaggacagtctaaactcaatcccatggtgttataacaaaaacaagacaaaataacaacaaccaaaagtcacacaaaacaaaacctgtctgggaccaagaagaaaaagtaccaatggtcatgcacctcaccttctctaggacattctagaaattcactggacatcagtacctcatggagaggcttctcggacaaactgtccagttagacagggggcttatgtctggtcactaccaaaaatgaagcaacagagaatcctaattaaagaaagcatgaaataacattttccttctttgaagcttaaaacttcttgatgtttttaaaggtaagcttttctttcccactttattccgtgatatttatccaagtatctgaagacagatcagagtggtcagtaaaaacttaaaaaataaaaatctagcttcataatttccaaatacttttggcaattggatttagcttaatgcagtgttgctgtatgtagattctgccttagcaaaaaaaagaaaaaacacacaacttggtaattaatttttacacattgtatccagagatgcttcaaaagttttagaaaatattttttgttccctgaagtaaggaaaacacacaccccctcccacccccatgcaacctcttattctaatttgcattattgatgttctcaacaaacctctctttccttgggttaactttaatacagtccttgttagaattctcatggatcataaatcagtgggatccaagtaaggccctattagttctacttataagacatttaccatgctgggcgcagtggctcatacatgtaatcccggcactttgggaggctgaggcgggtggatcacttaaggtcaggagttccagaccagcctggccaacatggtgaaaccccgtccctattaaaaatacaaaaattagctgggtgtggtggcacacacctgtaatcccagctacctgggacactgaggcaggagaatcacttgaacccaggaggcggaagttgcagtgagccgagattgcaccagtgtgcaacagcctgggtgacagagtgagacttggtctcaaaaaaaaaaaaaaaaagacatttacctgaaaggtaaagtcctgcttctggatctctttagaagcacaaaataagtttctggatttgcaggaccttatttcccttcatgaactcgttaagcaaaaacacaggtacctcactttgggttggacttggcatcctgatagagcataattacgtcttaggaaaagtcaaatcagagaacaagggttagtgaataatgggtaaaaggaatgattatgaaccaagagaatgagctaaccattgatctttctccatctgtgcactgagatcctcctaggagcccttacagtttataaatcaatcttttcatgatttaatgacaatcttggagaaagatcaccatcagtctgcagaggagaagatctttctagcattaataaacagtgatctggtaaacccaaatcagatgaaattattgacactcacaaactagttgttttccaagcgtccctggggtgtggataaagactttggaggagctatttcatggtaaaaggactgttttggtcctgaaggttccagtggcaaagcccttatgagaactgggggattctagactttattccaggatggactaccatggacctactcatatgaaggctcaggatttactcaatattggaagagaaggaaaggaaaggaggaagaggaagaagaaacaaaatagttcttagtgattcaacacctaccatgtactagtatagcacactcatcactcatttttattagttccaatgacaaacctataaggtagactttattcttctacagatcagaaaacagattcattgactttccccaggccatatatttattcagctaatatttattatgtatgtgttttaggtgctggatgaacaatggtggacaaggcaaaaactctacctttggggagcttacattttaattaaataatttttgaacactttgttgactataactcacaataagaaacattaaactatcgcaatatgtacatcttataaacaaacacacatatatatttgaaacaaaatgtttacatacatagactcgtccttactgcatgtgatgcatgcttttatattttcttttctattttatgtctcttttaaagccaattaaattgattttgttatcaactaatgaatcataatctaaaatttgaaaacattgtcttagttgacttgaatagaataggaatagtattgatattaatcaatatcaagaattccaaagttattttgataattccaaagcctggggaggtatcttcatctttttcagtgcacagtttaatggcctagaaaaggaagatgagaagtgggaggagagctgtctgtttcttcacagcctggagttgtttggtggatgtcatttaacttcagtctggatttgccaggatgctcaaactccatctcttcttcatagtgtgtcttctgtttgctcccagcaataataatgtgtttcattttcctctaacctttgttcttcctgcataggctaacaacagaatatccaggtcactatggtgaggaaatggacatgatttcctacaattatgattactatatccgaggagcaacaaccactttctctgcagtggaaaggtgagaaagacagccccttcccaatgggctagggttaaaggagttgggactaactccctgcaaggattttacctgcaggaatttataaacacacacacacacacacacccacacacacacacacacgtagaatacaagtgaaaatttcttacatgcacatatatttctgcaggaactttgacctgaggttttacttatcttagtttcctacctggtcaaggattaactgcagttttggctggaaaatgggaggcagtgggaagtgagctgttctcatgagctcacctcatggagctgctcaccttgcaagtgagggtggattccagcctgctcaagagcagagagtcctaaactcggtatcccttgatggtctaagcttttcccctcactcaatttcaaagagcacttttcctcatgaaacaccaagaggagaaggcaaatatgcttagaggagtgcccattgtcaaaatggacccccttccaccccgtgcctctatatcatccccactttgggttttaggaaagaagagagaagagaaagaaaagggattggagataagaaacacacagaacctactgtcttagtctgggctgctataccacattaccttagactgggtaacttacgaacaatagaaatttattttcacagttctggaagctggaaagtccaagatcaaggtgccagcaggttcagtgtctggtgaggggttgctcgctgcttcagagatgttgctttattactgtgtcctcacgcatggtggaaagggcaagccagctcccttcaacttattttatatgggcactaatcccattcatgagagcagagccctcatggcttaatcacccccctaaaggctcctcctcctaatactatcacattgagtattaggttccaatatataaattttaaggggacaccaacattcagaccatagcatctaccaaccatatttagaaatgaaaggagttaacaatccctcagtaaacctgcaaaaattaatgaaagaagagaatttaaatggcctaaagataaaaacagcactaacacttttttcatcacctttctctcacaatcaactccttaatcctatctcaaatacatcaaaacggtaagaagaaaacaagaattgtactccctattaatatagagaaatgtgtgggtaaattcaggtgttaatgattggtttggcctacttttagtcagccgataatcactttacacagaaatgaattcctgaaaagttaccaataaatattttgcaaaccaaataacacttacattaactcattagatagtatgctatgatgaatttgagtgtgacacatctttggtgtgtgtctgtgttttcaaacagaattacatcttaaataaagtgaacttatttaatatgacctagaatttctttttttttttaaaaaaaaaaaaagacattaagtagctctggaaaggcacaatatatgttgcaggctgatcagcaaaaacctttatgtttacccataggcaaaccactcagtttgcacacattacttatttttactttagatacactttaaactagcttagttaccaattttctagaagcagcaaattagaaagggaaacgagtatatactacttagaatgaaactcattccaccaatgagaataaatagctggatgacatgataacaaatatgcttaagaaaaataaagaaaatgaaaggctcaagaactcaaagaacatgggttgtcatttagcagggccatgctccccaaagtgcaaaacgaaataacaggggtgctcaatgctccaaatgatgacttcagctcaacaagaaaattagttctatgttccctgtttaagaaagcaggaattaatacagtaaaggaagagtgccatccaagattagtatgaaataaatatatctgagtagttaaaatgctcaattcagttttcagtaaattcactttttagtaaatttttcggttatgtggattacccagaatcatgaaaaactgaaatattatgtcattgcattaatttaaaatgagtatcctccccccaaaataaaataaaataaatatactcatgcaactttgctactgtcatcaaaaataagtagcttaatgatccacaacttgggtttcttctcctctgctgaaagatgctgaggtccccagcttggagaactattgtcagggcaggactccttgtgcaagagctttccctccacatgcaaatcatagtggtttcctcttagaatgctgttgttccatctatgcgctattgacatctagggccagatatttctttgtttcagggtctgtcctttgcattctagatgtttagtctacccactagatgccattagcaccccaccctaaccaaaagaagttgcagacattgccaagtattcccttggggagcaaatttgcccccactgtcctggtgtgaaatcagagactgaacctggtggaatcatttggtcttcataagaccaagtctaagttttgctcagcatcaattaatagccttctaaaagagtagtttgaatgcctgatcataagatcttgtttatctgtgtttgttgctacacagataaataagacctggctgcagtaattacagacatttggtaaacccacaggccaccaattttctaatttccttctaaaacaatctatgacctcttttgacaattgcaggaatcaaaatatcacccaggccctggtatcacccagaccctcaagttgatcacccagatttgtgttgagggactctatacccaattgttctaaacaaacgacccggagcaacagactcagaattagaaagcctgccttaggctgtttgagcagagtgagccctgcttcctaggactaagagcaatcagccccacttttcagtttagaagctggatggaggccttgttagtcatagtgtttaggataaattgttgaaaagagggcttgcagattgaaaagggagatagataattctgagtttgtaaaggaccccaccaagctttggaatgatttgcataattaaatatggaaaaactcttcgtttttgccctttatcaggactgtgcaaagggcatggcagccacgtgttcttctgggcttaagattacctagttaggcagactgtgtggtttaagagaaagaccaagatttgagtacaataaactgcgaatctgaaattgtcacctattacttgtattaccttaaagcaagttaattatttctctgagcctggtttttcacctaaacaatgaatcgttgtgaggattaaaagagaaaacacgtaaagcatctggtgcaatgccagatatattagaggctacaattatcattatcactgttcaacagtattagaccacaggagtgtcatgcaatgtaggcactcaaaacatttctcttaaatggatgaataaagaacataaattcaccctgagcaaagaacattccttgaaatgtatccacaccacatttttcaaaatttagtaatgctatgtacactcttcccatccccaaccacttaaacacataggcaattcataacaattcttgtgatgccagaatggcagccattttcttttttaatttaagggactttttcattcctctgtagcagtgttttctgaagggaaacacatgtatagcacagagcccagtgcatggtgagcactcagcatatgttaagtgctcagaaagagtcagtgggaaaatggacggactttttaaaacaagatttttttcttttttttgagacagggtttcactctgtcacccaggctggagtgcagtggcaccatctcggttcactgcagcttcaacctcccggactccagcaatcctcccacctcagcctcccaagtagctgggactacaggcatgcaccaccacacccagctaattttttgtatttttttgtggagtcagggtttccacatattggccagactggtctcaaactcctagcctcaagcaatccacctgcctcagcctcccaaaatgctaggattgcaggtgttagctaccaagcccagcctaaaacaagattctttacaatgaaatggagatgatgttaaataaatgcttttattccaagctgttaacccacaggtccttgaggtactttctggaggcagcaggggtgagctgaccaccagtgatgaacagaggcctccacacagccagtgacctaattagtcaccttcaagggtgacctgaactcacagatttgtcggttcttgggaaactgcataaagatgtcttctaagagcaaagtgagattaagtgtcccttcagttcccagatcctccaaatgttctctgctgctgtttccccagcagcgattcttcctgccatgtcctttctcactgacattcattttctgactctccctcccacagggatcgccagtggaagttcataatgtgccggatgactgaatacgactgtgaatttgcaaatgtttagatttgccacataccaaatctgggtgaaaggaaaggggccggggacaggagggtgtccacatatgttaacatcagttggatctcctatagaagtttctgctgctctctttccttctccctgagctggtaactgcaatgccaacttcctgggcctttctgactagtatcacacttctaataaaatccacaattaaaccatgtttctcacttttcacatgtttcatagcaactgctttatatgactgatgatggcttccttgcacaccacatatacagtgcgcatgcttacagccgggcttctggagcaccagctgcagcctggctactgctttttactgcagaatgaactgcaagttcagcatagtggaggggagaggcagaactggaggagaggtgcagtgaaggttctctacagctaagcctgtttgaatgatacgtaggttccccaccaaaagcaggctttctgccctgagggacatcttcccactcccctgctccacatgagccatgcatgcttagcaatccaagtgcagagctctttgctccaggagtgaggagactgggaggtgaaatggggaaatggaagggtttggaggcagagctgaaaacagggttggaaggatttcctgaattagaagacaaacgttagcatacccagtaaggaaaatgagtgcaggggccaggggaacccgtgaggatcactctcaaatgagattaaaaacaaggaagcagagaatggtcagagaatgggattcagattgggaacttgtggggatgagagtgaccaggttgaactgggaagtggaaaaaggagtttgagtcactggcacctagaagcctgcccacgattcctaggaaggctggcagacaccctggaaccctggggagctactggcaaactctcctggattgggcctgatttttttggtgggaaaggctgccctggggatcaactttccttctgtgtgtggctcaggagttcttctgcagagatggcgctatctttcctcctcctgtgatgtcctgctcccaaccatttgtactcttcattacaaaagaaataaaaatattaacgttcactatgctgaaaa

SEQ ID NO: 108 - DNA, 52389 bp, Homo sapiens
ccccggcacgtccccgccgggcccgcgcgcctcgtgcctcgcgcctcgcgcctccagccacgtccccgccccggctccggcgcgccgcggagttggctgctgggaggtgcgggactgggtgtggccggcggctctggtctcggctgtgagctgcgctctccacgccggctccgcgctccaggggctgctgagcgcccagcggacaccggcagcgcgcggtcgacgcgggcctgagctccctccaggtaggcggcgagctcgcgagcggcggctcgtcggtgcgccccgcgaagcgatcccgggcttctcgcagggacgtggggcgccgcgagccacccctgcggaacggggcccgggtgacggcgcggggcggggcgggtctccccgggctcgggcggccgacgctgcccgggagggacgaggagggcgcgcctgtgtcgcgcccagctgccacgcgggaactggccccacgaccgccggcgcaggcacttcccgggcggtccagaccgctcgccccggggagcgaggaacggtcggcggtccaagtcctgcagacccccctggtttctcgtcactccccgaggcctccttccaggaactcagagcacgagcccgtgcgtgcccccaaaataacgggtattcgggactgcccagcagggctgttgggtggagagtgcttggaagactcataaaagttctacgctgagtccaaaattagtccaatggttttgtttcagatttattttggaaatgatataatgtccagagtttggggatgggaggggattgatgaattttgaatacttgtgagttcagtacaataaaaagtgttttgcttttctctccacctttttctgcttcagaacacagatgattgccatatactttgatatgtattgctattcgctaagggaacgttgaattttcaaaagtttgaaaccaggctttcatttgtttatacaagcaatactttgttatttttcgtctccttgtgttcccttttctcccactccttccctttctctttccataaaggataaggatgcatctttctccctctcagccaccgacaaagtagcttggcgtgtggcttagcgggaagttttcttaaaacgttcaaaatttaattgttgattagaacttttattatgagtccgtctcagtgttgcaaacagagtttatgaccattaagtacatcttctaggacagagacagaacacacgctacttaatttaagatgggagggaagttatttctagtcggagaggaggacggctgattaggtgcattcaaaattgtgtgcttcgagtctctgccattgttcattttaatactcttcagtttggggcttttggtttactactgatcctaggctctgaaaatttactgtatatttcagtatgtggcttaaagacattttaagattttccatgttgcattttggtttgtagatgaatttgaaactgaaatagaaacttttaaaatatcatcttattgaacgttgtcaaccctctgtatatacatttataaaactgattgatacagcttgtgatattttaggttggttcaactctttgtgggcccataaacattatttaggaagttattccgagtctttggcctttgttaacctgtagaattgtttcttttaaacaattggcatgtaagtatgtcagcacatacttttacactttaaaaatagactctggggcaatttgaaaattaagaattggaactaagtgttggacattcttctggccttaccaaatactgcctgagatggtgtgatttctcttaggcatgttattgaagtcagctggctgtatcatcagtttctttaccttgctgactattttaatctgcgtctgttatggacttatttattaaaatatctcttctgggctggggcagtgctgtaagttattctacttatatctcacagtaacaccattatctacttccacaggtaaggaaattgtctgtgaggttttaagtaacttggcagtggtcatgtaggtgttaggtaactcaactgggattcgaagcaagacccctctgtttccaaagtccatgttctttcccctgagccatattaacttagttcgagggcatgaggagtgaccctcaattactcattagcatgtgtgtaaaatatccaagacatgccagaagcatgtttgtttttccagcatgatcattattgtctgtcccatgtttttatacagcttctcacatcagccattctcttctcaccactctactcctagttaaatgtcttgttccaagttcaaaacctcccttttgccagggcacagtgtatcctattgatattaataggtagtgatggcttaattatcttgataaaacagtaactccattttaatgtgggttctctagagatagagttataactaatttggaaggttacaaacaggattgcggtcaattttgggatatgagaaccctttgatatccctcaaattaaactagaggatattttgatggatatttccctctgcaatttatcatactctctcctgcaccttcaatttgtcagttactacagaatcatttacattattgtacagtctgccattttaaaataaaatggtttcttgatccagtgttctgcttcagtgactgcctcatttctttttatttatttatttttataaatagaagcgggatctcgctgtgttgcccaggctggtcttgaactcttgggctcaagcagtccacccacctcagcctcccaaagtgttaggattacaggcgtgagccacggcgtctggccctgcctcatttctctacctcaccttgaggaagcgtagttttttgacagaacaaaaaataaatacaggagtgagaaccagaaactaattagttacctacaggcaccgggtaggaactgagtaaatgggaacaacagaaggaatggccttgttctgaatgtacttttttgcatagttttgagttttggaaactgttagtcttttttatgttcaaaaataaaattaacaagatgtggagagtgggactccaaaacaatacaaacagcaacaacaaaccgtgtatttatgtgaataatataaactcccagaagaaaaaaaaaaaaaccaagtaagttttgagcacaggattaaagattaaagaactgaaaaaataatcttgaactctgtgtagtaggctattatttgtatggtagaggtgtagcaattctgaaactattttgtgtgcattataggattgagcaaatgagtaaattcattgatattttgggaactagggtttccaacgtggaagaagagaaatgaaaacatgaaacaggccaggcgcggtggctcacacctgtaatcccagcactgggagaaatgaaaagttaaaaataaaacttcaaacaataacaatgcagctttgcttcaaaaagaaaatctttgaagggactccatgtaggctgtctctactccttatctgccatcttcttctgaacccgcttcagagacacattatccctcctactccatgaaacaattcttctccaggtcaccagggatgtcagtcttgccaaactggatcttcagccacatttgacacaggcaacagataactccttccctatcaaaatgtcgtttccccttggcttctgggacaccgctctttctgattttcatcctgcctcattggctacagtttctcattcttctccatctcagtcaatggtaccaccatccaccagttgctgaggctaaaaattctaattccccatttcactcattctaaatctattccttcaacagcaagtattatgggctctaccttcaaaatcactgcagattggaccatcttttttaaaaagttaatttgaccattcctatcacctgcactgccaccaccaccaccctggtgtcaaactgtattcttccctggcctggatgactgcaggagccccccaactggtttgtcagcttccactctctgtctcccaccagccagcatgaactttaaaagaggtaaatcaaagcaggttatatctcagtcgtcagaacccattattgttagataaaataaaaacgttttagccaggcgtggtggtgcatatctgtggtctcagctacatgggagtctgaggcgggaggattgcttgagtccaggaggtcaaagttgcagtgagccatgtttgtgcctgggcaatagagtgagaccccatctgaaaaaaaatcaggattttttttttttttttttttaataccatgatcaagagacggtgactgggctctggcacacccttctagtctcatctgctgctctctgccctgctcactctcttccagcctcgccatcgtcactgctgtaggtccagcatgtcaggttagtttctgcctgggcctttgcttgctgttctgcctgtaatgctttctcccaatgaagacatagctcatcctctcatttcattcagtccttacttaatttatttgaaaatagccttcctcgtcaccctctaacctcttgaagttcttgcagtttttttcttgcatacgacttatctgtacttaaaattatgttattgatgtgctgtattatttatctcctagacagatacagaacaaagcactgtggcaataggaagttttgttttgtttactaccgaatctctagagcctagaatatgtttggcacatggtcgggactcagatatttgttgaatgaaggaatgaatgcatgaattaatatttgttgtatcttagctaatgccgtttcaaatggagaagacggtttccagagaatcttacagcgttagtgctacgtaaggtgtttggtgatgctgctacagcttctctgaaagctaacaagttaccaactttgagtgttttcacgttatcacctttcttttgtatgccctctggtggagtgatgataataagcggcaagtgagtagaataggtcaagaagaaactaaaatacaagaacctagatcacaaactggataattaacttaaaaaaaatagatttgaaaattttaactttagttaagcctcctgaataattacaatacgattagaaagaatgaaaagaaaatgagccacagatttgaagagagatctggcttaggatgaaaaaataacctattgagcacacccaaaatgtttggatctcttaaaagaattcctgcttaaatatacttctgtcccttgaagtattttaatatttttccatctttagttcaaagacctctttctctcaactgtagtaataatttcagtgaacctttattgactaccatgtgtcggttaacgtacacaagtggtgaagccagtgttcaaactccagcagtggaggaccagagtcagtgccctaaatcttcatgcttcactaccacctttgtgccaaggtcgtgtggatggtacagggaccggagaatttcctttggagcaatagttatggacagaaaaatgcttggtaagttcacagtgtgtgttcctcagttccattttccagtatgtttatagagagccttttcttccagaattgctgaaagatgtgttattttatcttttttgaaatagaaatcacatgaaatgtttctacactcagatgctactgacttgctgaaataatataaagtttctcttagtgtctatatttcatatttatggcagtaacagcttaattgttcctccacttttggctttagcagggtttgttcatatactgtgtagttattacaaaagaaatgtagtataccttactgggtaaggacaaactcccactgagatgcttgtcttacttgcagtaggaaccctctaaaaaagaattcgctcagaagatatcattattcttagtatctctgcaagtcagagcgctgtcttcttaatagctgcataatatttcactgtatgaatgcatcataactactctcctatttatatttttaatttgttgtcatatatacaattggttaatgaatatccttaaacattaattcttacctattatgcaaaagtgttggccagttgcagtggctcatgcctgtaatcccagtactttgggaggctgaggcaggcagattgcttgagcctaggagtttaagaccagcctgggcaacatggtgaaaccccatctctacaaaaaaatacaaaaattagccaagcgtggtggtgtacgcctgtagttccagctactcggaaggctagggtaggaagattgattgagcgcaagaggcagaggttgcagtgaactatgatcatgccactgcactccagcctgggtgacagaggagaccctgtcttaaaaaaagaaagaaaggaaaaaaaagtataaagtactctttttagaggccttactgtttctactctcttacttttagcttgtcatgaattttcagctgtggagaaattaatgaaatctactttctctatggaacagattctatcaatttctctatagctgaagaaagagagaatactactttgggagggacaagatgaggacaatggcctctatgctcaaagaactaataattgctaggctcttatataggatttttaatttttttttttaatggcaacacttagcaatggcttgactcattttttttctccttatttttatattcagtttttcaactaaacacctttacccagagattgtttaaaatatgaaaatttgtcattaactacttggtaagtgaaattaaaaacccagtaaggcagcttaagctgaatgaggttttatgtctaattggcatgtgacgtaaattatatacattatgtttaggatagttaaaaaggcttaccgtggctagtttttataaggaaataatttaagacattctagaattctgcaaattaaattatatatgtatgcatgtatatactttttgagacagagtctctctctgtcacacagactggagtgcagtggtacgatcatggcttactacagccttgacttcccaggctcaagcaatcctcacatctcagcctcttaagtatctgggactataggtgcatgccaccgtgccgatgaaactgtgtatttaaatggaacatggtaggcagttaagtacttgaggaaattgaaatttgtcaacaagggatcttagttatctgtattacgtattaaaagggctctagggaagcggttgagaggttaaaaaaaaaaaaaaaacaccctgaaaaatgtgatctccttgccgtgtggtctaaaaaacaaaaaacttagtaattaaaaattttaaacttagatattagttttcatggtttgtgttaaccttactatgggaattaaaatttatgaacaggagatttcatttggttcattaattattgaatatatcaccagggaaactctttggggggaaaaaaatgaaaaaaccacagactcctcctggctgtaagacataaagaaaatagagataggttagtatgtaaatttcattcatgtttatgtgttgactcaccttttaatgcaaaaaaatctttgcaaaggttttagaaatgatgagacagattatgagaggatgctgaagaatcggggggattgtgtgttcccttaaggcattgaagagcagtcttggtatatgtgatagagagtgttgtaggataaaaacgtgaataggaaaatcagcagtagaacaaaactaaatgggactaaatgtaactaaaaatgaatattctattcgaactgcatggtagagataagaccctttgaatgatagattccgagaacattagtggtggggtagagaattggggatgggatagaatcccaaataacttcagttattaattagctgctaatctaaacctgagacagtaattgtatagtatttttgtaaatgaagtgtcatcctgaggtagcagagatggatatctgctcatctcagaacagtatcaccataagtacacttgcttgttaactaaaacctctaaaattttatcttataggtaggcattatggctttgttaagaaaaatgaaatctacagtgaaagacactggatgctgtattctatttctacttattggtaactttaagatattttacctgtttttttgagacgtctcactcagtcacccaggctggagtacagtggtgagatctcggctcactgcaacctctttctcccaggctcaaaagattctcatgcctcagcctcgcaagtagctggcattacaggcatgcaccaccacacctggctaatttttgtatttttagtagagatggggtttcaccatgttggccaggctggtctcgaactcctgacctcaggtgatccaactgcctcagcctctcaaagtgctgggattacaggcatgagccactgtgcccagccataagatattttacttttattaaagctgtgaacataagaaattgtagctacttttccgtgactatggtaattgcacatgttaacattttgtcctatgaagcggagttagcaaataagctagatggtaatgcttgtgaggcactcataaacatttgttggatgaaattctgatatccccagttgtcatattctaaccctttaatggtgggattgatttttaaaatttttgtatgtaaccaaaaataatatataaccaagtctggtaaatttaaagggttgtttctggtaaaacaaaagcaagttatgtgactttaagtgatacaaaactgccgggtatggtggatcacacctttcatcccagctactcaggaggctgagatgggaagacagtctgagctcaggatgtcaagacaggcctaggcaacatagtaaggaccccacctctaaaattttttttttttaattagcttggcatggtggtgcatacctgtagttccagcaacttggtaggctgaggtcggagatcgtttgagccactgggttcaaggctgcagtggtgagcaaggatggcagtgccactgtgctttaacctgggcgacagaacaagaccccatctcttaaaaaaaaaagtgacataggactgtggcttggtaacacagagataactacatgtggtcgtataaaaaaaaatccaagagataataatgcttgagtgggtcatgtaagaaaagacaggctaagtgtatgattttaaatttacataatcataatttatgtttctaatgtttagttcacaaaatcttagagtactaaaaccaagaggctcctcttagagaaggtagttttaggactaagtaaaaggaaatgccctgctattttacagagctgacgtaaattgacagaacttgttacttttaagaagtagtacaggtgaaaatataagcatactaaaaatgggttcaatgaattcatggacaatagtttcaaaacgtattgtgtaaaatttaagagaaatccttagtatgttgagttcagccacattctcataaacatttggtttcaatgacgtaatactttaaatacaagttctgtcatagcatttacactgtaatatgattatagtgatgagccccataacgatatttcagtcggccgggcttggtggctcacgcctgtaatcccagcactttgggaggccgagacatgtggatcacctgaggtcaggagtttgagatcagcctgaccaacatggtgaaaccctgtctttactaaaatacaaaaattagccaggcgtggtggcgggcacctgtaatctcagctactcggaaggctgaggcaggagaattgcttgaacccaggaggcggagtttgcagtgagccgagatcgtgtgccactgcactccagcctgggcaacaagagtgaaactccgtctcaaaaaaatgatgtttcagtcagtgagttgactgtatatagggtgatggtcccaatttttttttttttttttgagatggagtctcactctatcacccagtctggagtgcagtagtgtgattttggctcactgcaacctctgcctcccgggttcaaacgattctcctgcctcagtctcccaagtagctgggattacaggcgccggccacccagcctggctaatttttgtttgtttgtttgtttttgtatttttagtaaacacagggtttcaccatgttggccaggctggtcttgaactcctgacctcaggtggtccacctgccttggcctccaaaattgctagaattacaggcatgagccaccatgcctggctttaccatgtttttactgtcttttctatatttagatatgtttagatacacaaatatttaccatggtgttaaaattgcctgcagtgttgagtatgcagtacgggttagtagcccaggagcaataggctatatgctatagagcctaggtgtatggtaggcaataccatctaggtgtgtgtaaggacaccctatgatgtttgcacagtgatgaaattgcctaaggacgtgtttctcagagcatattcccatcgttaagtgatgcatggctgtatagttacttacctgtttttccaatggatgaatgtttctgatggggtgggtttctgtgcctagcacagggtaggtgtcaaatacgtgtttgttgagtggaagaaggaatcacatgatgatttagattgacagtaggtcaaaataatactcatttcttatgtacttttaggagtataggtgaaaataataggaacaatgcagaagaaaatccttttgaaaaccttcccaaaatgttgactggaaaagagtttaaacttactcatttcaagctgctattgtatctctctctctctctctctctctatctatctatatatataggaatttttaaaaaatacaccgaaagaatagaaacatatcaacactatacttaacacatgtactctgcattaggttttaattccatgaattcctattcattttttatttttatgcatgaaagtttactgggtaatggaatttaccatccctgtttagattctgcattgatgacatatcctgttcaatgtcataacccctaattattaaccgtgttcaccccaaatggatccatttatgatacatggagaaataacttgtttttcttcttggtcaatttgtgcctatatcgactgatgacattgtgccttgttcagaaaacgtaatcacaagttcttgaaaaaaataataaaacatgtaaaagtcagctggcatttcagaatctaagtccctttttaattcccaaaatacatgaaacactattttcttggtattttctcatgtactttgctactttaacaaagattaattcatttaagtcttaattttttaaaaaatgtctcaagtgtctcttttttcaggtagcatgaatatttcaagataaaagaagacagcttggttcctaactaagcctgtccttcctgacctgggtatttatttcattcttatatttcttcaagagtaaagtaagaccaaaggaggtatagctgccccccaaaaatcatagttctgtttgaggaattgtttccctcaaggaaagagaagataacacctgaaatatgtcaaggaattaattgttaatgatttctgtgtacaaatattttaagttgggagtgttgagaaaattgcaatttatataggaacttctttgccctttctgaagccattctttagaaaaaaattcaaaatcttatcacagttcacatatgggaagttattttgctttaaaatgaattaagaacaagaataatgttttaaaatctatattccttttaatgtgtaaatcaaagaaaatatctgaggcaagtctcaattatttcgtgaggtttatttgccaaagttaaggatatgtgcctgggaggcaggtctatgcctttctctgaagatgattttgagggcttcagtatttaaaggagaaagggcaggatattgggaaatacacaattttcatatgagaaatcggtaggggaaaacattcatgcctttgtctgaatcagcgaatctgtatttttacataagacaacatagacaaatacagcagaagaagcagtgagatatacatttgtctcaggtgagtggagggatgattttgagtcctgtcctatgtccccacgcctgtgaagataagctatcaattcacattgccttggtgaccttcaacagaactgctttagggtagagatctcggggcccacaaggatttcttcaggggccaagtgtgagggaggtgtgtagcttttcatctttgtagccatcttatctaggaaccataatgggaggcaggtttgcatgacccagcttgacttttcctttaggcttagtgagtctggggttccaagatttattttcctttcacagatgtctttatgtgtaaggatttagatgttttatctgatcaggaagattataaaagtgccagtttagtgatttttaggaagtgattactgcatgaacacacgttcttgaactttcctccaatcacacgatgttaaactgcttgtgtaaataagagcttagaccagtggatctcaaactctagagagcttcagactcaccgtgaagacttgctaaaacacagattgctgggctctaccctcaaggtttccgagtctgtagtcctgggaagggatttataaatttgcatttctaacaggtttctacgtgatgctgatgctgctggtccccacactctgagaaccacagattgaaactgtttggttaaattagtggttatcaaccctggttccgcccttacacacttgaagagtcaaggccttagggtgggggatgggccacagagtcaggtgctgctaatgaggtggggcaagtatttaaatcttcaggatgtggatgtagtttgagaaagcccttcaaataactggttgttttcttctattctctctccccctttgaaaccactctcctctacccctcaataggagagtcctggtgcaaatgaaacagtgctcatggattgttttagtcctctcccagaaaataaaacacagcctttaccaacagttgccccaatgcttcttaaggagttcagtagaggaagaagtagttaaattgcagcataaggccaagaaaggccttccttctggtcatttctttttccatttttgtttagagcactgtactattagatctgtcaattaatcactgtagatattagcctgagtagtgttcatggctatagcttcttcatatatttcccttgctgggccaaattgacttaaatttcccaagacattaaaaaatgtgtattatttaattcccaaaacaatcccataggggtagagatccccactgcacagatgaaggaatggagacttagagtagttaaagaatttccggggtcacactgtaagtagtcatctctggctccattaggttgtgtgaacttggctaaggtccataacctccatgtgtaaagtttcctcgtctgtggaatgagaatgatactggtacctaccttctgaggttgttttgagaactaaataaagagttactacacagagttgtgtacatacacgtaataaatgctcagtaaatgttatctcttagttggctaactcctagttggtactttttaagttcggggtaatcctgccttttctttttctttttttttgagatgaggtctcactctgtcgcccaggctagagtgcagtggcacaatcgtagctcactgcagcctcgacctccagggctcgagtgatcttcctgcctcgacctcccaaagcactgggattgcaggcaaatgccaccacacctgggtaattttttaatttttttttttgtagagatggatacctgccatgtagcccaggctggtcttgaactcctggcctcaagtgatctgcccacctcagcctcccaaagtgctgggattatgggcatgagccactgcgcctggcctatcctgcctttgtgccaggcagtcctcctcatgtgtattacaggtcagtctcttaacaatttagaaataccaaatactcttgaaaactacaggtttttttttccttttcacaaataatttagtggcaaaaccttatatgacctgaactcatttggtggcacagtgtgacctgaactataacaacatgaagctattgcttagtctgtttttgttttttttttgagatagacttgctcttttgccagtcaggagtgcagttgtgcaatcttccgctcactgcaacctacgcctcccatgttcaagcgattcttatgcctcagcttcccaagtagctgggactacaggctcacaccaccatgcccggctgatttttgtatttttagtagagatggggtttcaccatgttggccaggctggtctcgaactcctggcctcaagtgatccgcctgcctcggcctcccaaagtgctggggttataggttcttagtctctttttttcctacctcatatgaacatgctttacattttgcttcagaaattttaattcttgactctgtgggtgctgctctggggtctggttttggtgttatgccaatacaatgaatgtacctttctaaaacctggaaacttccaaattctgaaatatatctggccctagggtttagggtaatggattatgggcctgtgtgtgtgtatttttatgtctgtcttcccttttagactgtaaactccttgagacctgggcctaagttttattcatatgtaaccccagttcctggcacattcagtaaatatttgatgagagaataaaccctaccaggacataacagttaggtgaagggaaatagactggagagcagtgccttatttatttcctggaacacaaaacagcctaccttcagttcacaaggggttgaattgttttactttaagggtactgaaaaatgctcaatataatgagtaacttggtagcaaaacaaaaaacaagataaaaaaccaaaagttaatgccgtatgctacaatttcagcatctgcaacttctgttttcctctcttatccacttgccccatgcagctgtacggttttgactaacttcctgagaaagaaagccacgtggagatgtctttgtatggaacacttggggtgggtgggcatgtgtgttttaaaatttcttagttaaaaaaaaatcataaaagctttaaatattgtacctgattcattatggttgttaaaaattatggagtgtaagaaatataaatttgtattgcaaaaagaaaagaatactagaaaatttacaccaaattaaaaattatgaatagacttttagagaagcaaaagtagtttatacttacatttttattttattttattttatttcattttattttattttgagatggagtttcactctcattgcccaggcgggagtgcaatggcatgatctcggctcaccgcaacctctgcctcctggattcaagcgattctcctgcctcagcctctggagtagctgggattataggcatgcgcctggctaattttgtatttttagtagagacagggtttctccatgttggtcaggctggtctcgaactccctgcctcaggcgatctacctgccttggcctcccaaagtgctgggattactggtgtgagccactgcagatccggcctatccttacatttttaaagtgcaatttaaaataacattttttatggcttatatgagctttcatgattggtatgaaacttagtagctaagaaatacttgtatttttttgtcttgcacagattaaaatgtgttcactaacacagcagtataattgtacagcctgcataatgccttgcttcagtaaaagttctgtggacattctaagacatggagtgagaaggccattcgaattatgcaagtgtatttttttccattttatttaacaaattggcttggatacagtggctcattagtatcttttgatatttgtaactggtacagctgaactcttaaaagataactcatatgctgctttctgctcaacaatgctttcactatgtgatagttatttaaaatgtgttaaatgaaccaaatattcatgttgaaacagtgcttagtcaagaagttacggtaacaaaataagagcactgtgtttatgaaacaatttctatttaattattagtttaaaattgccttagcgatgttaatgccactttgaagattgtgataggcagctccaatgtgatcttgagcaaaaattactattggttgaaattgcttggcgattacattgtccccttctgatttttttttttttttttttttgtaaaagaaaggaatggtgtgtgtatctcatattcctctttagctttgcttcctcccaagagggcagtttcttaactagcttgatgaagatagaaccctgggacacataaatcaatatttaaatgaatggaggagaaggacccacaaaggtaaaaagaaggaataattaagtacaaggataatcagagaagtatgggttcatgaaagccttaggaatgaagtttcaataagaagggaggatcattagattgagcaaagaggtcttaagatgccctttgaaaagaggccgtatggcagagtggtaaacagcctgggtttcagagtcatatgcctggattcaaatctgaactctattcttaagcaagttatttaacctgcctaagcttcattttcttttttctttatttttattttattccatttcatttattttattgttcccagtggacttcaggtacaagagttggataaattataaatatactcacctttgattcctgtagcactcacttttatatatttgtgtttgcttgcttattttatttatttatttttaagagacagggtgtcattctgctgcccaggctggagtacagtggtgcaggcatagctcactgcagccttgaactcctgggttcaagcgatcctctttcctcagccgttggagttgctggaactataggcgtccaccactccactgcatccagcttgtgtgcattctttttttcttctttcttttttttttttaatgagacagagttttgctctgttgcccaggctggagtggaggggtgtgatctcagctcactgcaacctctgcctccgaggttcaagcaattctcatgcctcagcctcctgagtgtctggtactacaggcacacaccacgacatctggctcatttttgtatttttagtagagacagggtttccccacattggccaggttggtctcaaactcctggcctcaagtgatcttcccacctcagcctctcaaagctctgagattacaggtgtgagccactgcgcctggcccattgtgtgcattgttaagcaatgtatcatttagttgtagttgttttttgagttttataaaagggatatgatgccaatgtgtgtctcctggaatttgcttttttttcctcccaatattattttaaagatttatctatgttgcatgtaactagttcatttgttttcactgctgtatgataattcactgtgaaaacactacagtgatcagttctcctgtcagtgggcattggtgttgcagtttattgttattataagtagtgctgtatgaacactgttcaatcctgtgcacatgtactatagattccttagggcttatatatccagaagcagaattgaattgtcaggttgaaagatacgtgtcgtcacctttgttagatgttgccaaattgcttccccaagagttgtcccattgaatatgtcccatttctacaactttgctaaccattggttgagacataaaatgttattaatctaataggcatgacattctatcttattttaatttgcatttccctgattcctgaggttgagtgtcttttcatttgtatgtggtcctctgaagcttttcctgctgtggtttgccagttcatatctttgcacattttcctgttggattgttagtctttttaatgattcatttgaagtaattactttaaaaattctagatgctaattcattatttgaattttagcttacaactatcttttctcagtctgtgacttgtttttttttttggtgttttgttcttttgaggtatctatgttctcatcatagataccttgtgtttacccaactgaagctgcttgctttttttttttttccaccgttagagacagggtctctttttaaaatgtttcccaggtttgagtgcagtggtgtgattgtagcttactgcagcttcaaattcctgtgcttaagcgatccccccactcagcctcctgagtggctgagactagaagcgtggaccaccatgcccagctggaagctgctagctcttatagttgatcttttctcatctccccagttttctcatatataggaataattataaaaattgtcagcagtggatgtgtctgtgtggtgggggtggagggtacagctggtcattgaactgttggtaagcctttggggagattctgctcccctatgttgaaagtttttgggttttgtttttttttaaatagcatgcttgatgcctgtttgtcttcatctttggggttcatttatcagatctgtgttattgggagaagtcccactcaattttctgttttgcctataactagtgtagatggaaaactttctgtctgtaatcacttcgtgtttttatcattatttcaggaaaagtctgatcagtgagaaatgatttttttggtttactgccttctcagattgggctcttgattattttaaactttaaggaacactgaattaattgatgctgcagttagtccgcctggctaagacccaatggaggatttcttcagtagtgggtgactgtcttgccaatttccaccccccctccactttccatatttttcttttcctcacatcacaaagcttcagacatccttttgccacttccctgatttctgtttcttattaaactatggatgtaaaggaactgcaggagggcaagtggttagatgactttctcttctgctgtcaaaatgtgtccttaaaaacctgcccttccctgaatttacgcatgcttctgataaacagcctgagggagctacttactaaactatacctgatgtaatagtattgtttccaagaattaaaaatttttatagtcatattgtgtacacacatgtcaatacagtttggccactttggatccttaccttcaaaacatatttactaggacttgccatattaggcttcacctggggcatcctatggcctttttttaccctagtcagcctttaggtttgtcttagagtagtttataatctattggtctgtgctagattcatgctttattggtattctcaggaatccaacagttgttggctgagaagaaaagatcacccaaaaatctgtgtaatcagaatgttctctctcccaagtgacaaaatgaatcagttgtgtttttttttaaagagtgaaaagttagttcctctttttagcagcaaaaaggaaaggggaaaaaagggcagctttgacatttctttttagacatccaaagaaaggttgcggttgtctggcacaggcatcacaagggttctgattttgcagcttagcaacatttctcagccccttgcctcataactacgctccctttccatcatgcctgcccaaacatagccggagcctgctggacatgaggtttgagaactgagaatttcatgtgagaaagtggggtcatgtgtaggcagttctctttaaaagtccttggtgaagggaagaaaaaggactgtaagtgatggtgcaatgtggagtcaaggaattttttcttttttctttttctttttaagggagggacttgggcctatttagctgctggtggaaaagacccacttgaaactgaaaggttctccacagattgtttgctggatgagagtgagggattataactccacagtggacaaattaagctgttaacagctgaacacactgaggaatcttagcttcactgatagtagcacaaagaaacattaagttcatcctgatgtgctacagtatgaagtccacagcatcacctggaaggattcttgccaaatatattgaacctgaatataatctagccggtagatctaacttccttccagtttacaagcaatcagtatagaagataaacaagttaaacagtaccataagaagtaaacagattggggtacattgtgtaggacaagtgatttagtcttttttttttttttttgagacagagtctcactcttcacccaggctggagtgcagtggcgcaatctcagctcactgcagcctctgcatcctgggttcaagcgattctcctgcctcaatttcccgagaagctgagattacaggcgtttgccaagatgcctggctaatttttttgtatttttagtagagatggggtttcgccatattggtcaggctggtctcgaactcctggcctcaagtgatccacccgcctcggcctctcaaagagctgggattacaggtatgagcaactgcacctggctgatgatttagtttctctaataagtcaatgtcagaaagtgcaaaagagcaggcaggagatggatacttctagatggtgggacaagagacatagctaaatgtattatatagttcttaattggatctggatttgcacaaatcagatgtaaaaagacattggtggaagagttgggaaaatttgaaaatctactgggttttagatattaaataatttctgttaattttggtagttatgataatagtattgtggtttggtagatattgaagtatttagggctgaaatgtcttgatgtctgtaactgactttaaaatacttcagcaaaaacaaaagataaagcaaatacagcaaaaaaaattaatactttgtgaagctatgatgaatattagggttgttcagtctttctctgtgttagaacattttataaataaaaagactaaaaatagagaaaagtgtaagagattgaatatactggaagtataagattacttaaaaggtgagagtttaaatcactggtggaggggctgggcatggtggctcatgcctgtaattttagcactttgggaggccaaagtgggaggaccagttgaggccaggaggtcaagaccagcctgggcaacatagcaagacactatttctcaaaaaaaaaaaaaaaaaattagccaggcatgataatgcatgcctgtagtcccagctactgggggaggctgaggtggaagaattgggtgagctcaggagtttgaggttacagtgagctgtgattgtgctgctgcactccagcctggttgacagagtgacaccctgtctcagaatgaatgaatgaatcaccagtggaggaattggcccaaacaggaaagaagtcagctattctattataagagaaaggaagggccaggtacagtgacttatgcctataatcccagcactttgaaaagctcaggtgggggggatcgcttgagcccaggagtttgagacaagcctgggcaacatggcgaccctgtctctaccaaaaaagaaaaaagaaaattagcttgacgtggtagtgcccacctgtgggctcagctacttgggaggctgaggctggaggattgcttgagcctgggaggttgaagctgcagttaaccaccactgcactccagcctgggcagcagagtgaggcctttgtctgtctgtctgtctgtctgtctgtctgtctgtctgtctgtctctctctcagtcacacacacacacaaggaagatgaggaatatgagtcagttatgtatgtatagctttgtatatctagtagtggaagattgaaaaagttcatgtttgatggcttctactttatgatatagatggcaaggtcatctgctgcaagagggcttgtgagaaggtcaaaattttgaaaagattgcaaaggaatttaaatatttgatagcaaaagcagaagcagtgcatacaaagctgtgcagggttgccaggtagttttgagggcccagttgagattggtgatgtgaatttgtagtagaactgatatgccccattgtttgactttctcaatcaatgtttggccacttgagtgctggctgaaagaaagtaggtagctgctttcatccagggttttgcttttgctgttgagtgtgacaagatggaagggcaggcaggctagggtactgtgaaaaggcttgaagttctggacctagaatgcctgatgaagtactggatgaagcctggttaagaagggatgagccacaaactcactattttccacattggacccctcatcttttttcttctgaaccctatatccatgactgtaaaggacctgggatctttacctacttacaagcgaataaatgagtctgttactgtttgatgaaactccttggtcagagacaaaagattttattactcaacggtgagtagcatggtgtgatgatgctttgtgttgattcccggtgttccccagtgcccacagggtgacacaggtaggcccagatggatgctgcacgtgcactggatttcatcacagcctagagacactgagcttgggggttttaccccttttacagtaaatagaagccattctgctcttcatctcatgaggagacattgtcttattccttgaggttgcatgttgcaaaacaaccctgagagatggcccaagtaacagccactagggacttgtgttcttggcattcccagccagaatgtgcaggaagggcccgggtctgggacagattgcctcacccgtcatcccatcggtgccccatccacggagtgatggtggtgagggaactgctttttctttgtttcccatttctattcatggtacctccatccttaggggcactcagcctggaaattctcattcatttggtacagatcatagtttatcccaagtaactcttattacaggtaactcctgctttagaaggtcactggtatgtgtgtgtggctttgggggaaggacagcagtaggatgggttacaggtaatttttaataagcttaaaagttctgagacccagcctgggctcagcgactcatgcctttggtcctagtgctttggcagggcaatatagctagaaccccatctctacaaataataaccataatagtaataataataactgcaaatttttaaaaagtcccgaggccctttagggtccctcgatagttctttctagtgttttagttagtaggagggatgtaaactagttgtgcttacccaaaatgttttgggaccctaaaaataaagaggtatcaaaataatgagagtttctaggactgtggggccagggatatctcaggaatggtcagcaagggcagctaaggttgcggctttaaagagcccgcatgctgcttgtcttcacttcagcggaatgggattccagaccggctgtaatctgtccagtctggccctctctgagatgcatactaaattgttaaacaatcaaactttatcagggaatggttaagactcataaataaagatggaaaatttggataaacagagaaatatgccacaatattaaattggaaatggaatattagaatgattttagttcttctggaactgttttatataccttaatgccattccagtcaatcccaatacatttattttttaattggacaaaataaatacaaagtgaattctgaaagaataaatagatactggtttttcttttctttttgtctgaacataataaacagatatttgtaccatagttgatgcgattgtagcatagacatcaaaaccaaattctctctcatgaggggaatcaatcttttataggaatttggacttaggacagtcatttcgggctacaatcttgacctaaaaagttataggcttgggttttgtacttaggggagcagaaaaagtcattctgtagaaagaaaaaaaccaaggaagataagaagagaaaagagaccaggacaggtagagaaagaatactcccagtttctagcctctagtgtctttttgaggtagtaatattcctgtcttttggttctgtgattcatcctaaatccttagaatgaatattcctttatttgttaagctatttcaggttgctttatttactggagaccaaagtatcttaagtgatggggatacaacaaagaataaagcaaacagagaccctacctgaaggaactttacatcttttttttttttttttttttttaaagccagagtctcactctgtcacccaggctggagtgcagtggtgtgacctcggctcactgcagcctcctcctcccagattcaagcaattcttttgcctcagcttcccaaatagctgggattgcagtcatgtgccaccacacccagctaatttttgtaattttggtagagatgaggtttcgccatgttgcccaggctggtcttgaactcctggcctcaagcgatgcacccacctcagcctcccaaagtgatgggattacaggcgtgagccaccacaccagaccctttacatcttatcagaaggaaagagatcacaagtaagtaaatacatgctgatggtgttgagtctcatagtgaaaaacaagacagggtaagaggagcatgtttgggtgcacatgtgctatcagcaaaggtcccactgagaagatcacatttgggcagatttagtaagggagcaagggattataaaatcagagacaggagctatccaagcagaggcaggagcaaatgcaaagacactgagactggggcctgcttagcatgttcagggaacatcagagaagtctttgaacaactggaacagagtgagtgtgagagtgatacatgaggtcagaggggggtgtgtgtgtgtaatgatacagggtctgtgggtcaagatagagtttagtggagtggaaaaccattggaggatttaaagtgacttgtattttaaatggatctctagttgctctaattagaccagagagtggtcgagggcagcagaaaggagaccaggtgagagatggtcatggtgatgtggacccagacagtagaagtggaggaaatcagaattagaacctggataatttcttaaggaataactgacatgatttgcaaatggattcgatggggaggctatgattaaaacaggactgctcccacatttttagcttaaacaattgtaagtaaggatggtcttgccgtttcctgagatggggaaggcttgggggtggggtggggttcagttttgaggtactgtgttaggtgccaatccagacatccaagtggggaagtctcttggtgtcctctgaactgttgtaaaatatttctcaccagactccattctggtactaattccccataattcagccttgaatactacaacttggaatttctcctccatcctctgatcatgttcttgtatacaacccttcagtaaataacctcattctatatttactaagcatctttaaattcctttaataattgactacctccattgaatttcagtaggtccaaaaagaagttatatgtcagtattgtaaaaccagattaagatgtaagtagagaactgaatctttctcttgctctctgttttttaacagctgttttcactcattagctcctgaggtaaacaaattgaaaaaatgagcgaactggaacagttgaggcaagaagcagaacaactgcggaatcagattcaggtaaaaccttttcatttcaaaatgttagcacttatttagtaccaggaatctacaaaatttgcctattagtttatcagtctatattaaatgatttctaaggctagaaatggtctttttttctctcacatggcgaagtaagaactgaggtctatttgtgtttaccatgtctcgaaagaactcttcaaaattcattgcgaacaagtacctatgtagaagaatggcctctatgaaagacagacataattctctttttatttacatgcctagaatcatagatttttggtacaaaaccataatgtagatagtgtcacaatataatgtcacactagggaaatattaatctatacattaattaggttgcagaaaatcattagggtgggcacagtggctcatgcctgtaatcccagcactttgggaggctgaggcaggtggatcacctgaggtcaggagttcaagaccagcctggccaacatggtgaaactctgtctctactaaaaatagaaaaattagccaggcgtggtggtgcacacctgtaatcccagctacttgggaggctgaggcaggagaatggcttgatccctggagacggaggttgcaacgagctgaactcacgccactgcactccagcctgggtgacagagcgagactctgtctcagaaaaacaaaacaaaactatcagtggcagaatcaaaacatgtctgacaccttttactcttggaatcaactcaaaacagtaaggataagaaacaactacaaactccatctttaacaaaattaacagacactagaacttcaaagcgtaatggatggagaggagttgccaaatgcagtgaagcagcagcacgtggggaggctctgagaggaggcgtctgcgtggggagcactctctaagagacagcaccacggtcccttctttggaacaatgggaacagatgcttccttggacttcattagcactgagaaatatcaaggaaggcagagctaaaaatgaaaggatatagacatgccatcttgtaggaagcctggcggtaagcagggtggaggaaagaggctttgagttgtgagtagcctggcagctgcctacttcttttcccagagaaaagtaaaggctaaagcaacgtacaagggtaagcagggagaatctcataacttggaacacagctgctgcttttcccagtttgaacctctcacaatagctgtttctgaagaatttgtctaatttaaaagtgaagagtaggctgggggcagtggctcacgcctgtaatcccagcattttggaaggctgaggcgggaggattgcttgagacaggaattcaagaccagcctgggcaacatagggagatccgtctctacaaaaacaaacaaaaaaacgttagccgggtgtggtggcttgtgcctgtagtcccagctactcgggaggctgaggtgggaggattgcttgagtccaggagttcgaggctgcagtgaaccatgatcacaccactgcattctaactggacaaaagagcaagaccctgtctccaaaaataaaatctctacaaagatgatacaagaaaagagaagaaaagattagtaaaaacagggatggatgaagaacattcaccagaaaagtgttgattctgagtgaagtcataaccagacagacttattgccaggaattcaaggaaggtaactatttagatgtgaataagaattatgagttgaaatcttaggtatctcaacaaagctttcagaacaaaggagagatgtattttgcctgggataatcacagaaggcttcgcagactcatctctgaattcgatgttactgcacccactagaaggaatttctgccctctctactttgtgtcacttactccagatgctgagcaggagcagctgattggctaaaccatgtggccacatgcctatctcatttaatcctcacaccgactctgtgaagtcgatggtgttacttcatttaatagttgaggaagctgaggctcagtgagattaaataagttgccaaggtaacagatccaggattcagaccaggtgtgttctgctataacttaaagttggttctcccaaccttagttactaatgtcctttcctgcgacttgtgctgtagccatactagtctggttccctgaacacgcattactctttctcatctcctttcctgcgacttgtgctgtagccatactagtttggttccctgaacacgcattactctttctcatctgttaccttttatcaaattgttcccttggcctggaattatacgacttctgagccaattttgctctttggaaatcctatctgttgagtcctaatcctccaagagccctccacttggatttatcttttttttttttttaaatcagagtgagacggagtctcagtcgcccaggctggagtgcagtggtgcgatctcttctcactgcaacctctgcctcccaggttcaagtgattctcctgcctcagcgtcctgagaagctgggtctataggcacacaccaccacgcccagctaattttgtatttttagtagacacggggtttcaccatgttggccagggtggtcttgatcgcttgacctcatgatccacctgcctcggcctcccaaagtgctgggattacaggcgtaagccaccacgcccagtcaagtttcttaacttcattgatgatcagtatctttgctgtgaagcaagagtaccagtaccccactttatatgtttctgcagaggattaagtgaaataacacatagaggacttagtctgctgccagcaagtggcagatttttacttgtacagcatgttggacttctgttatagagctgatcacggtctgccttgtgttgtagttcttgtgcatatttgcccctactgtttgtacctagatggataattttgtgtcttaatcatctccgtatctcactagcatcccaagcacaatgtcgtgggcgcaggtgctcaccaaatcatctcctcccatgatttgaagtaaccacatatatgtaaaatactatgtacttttcttagtttaattgtcacactatatttaaaaatctttctggctgggcacggtggctcacacctgtaatcccagcactttgggaggctgaggcgggtggatcacgaggtcaggagatcgaaaccatcctggctaacatggtgaaaccccatctctactaaaaatacaaaaaaaagctgggcgtggtggtgggtacctatagtcccagctactcgggaggctgaggcaggagaatggcatgaacctgagaggcagagcttgcagtgagccaagatggcgccagtgcactccagcctgggcgacagagcaagactctgtctcaaaaaaaatctttccttccttcctcctcccatctggaaatataatctaactatatttttaccttactatagtgtaaatacatgatataatagaaatgtatgctatgtattataatagatgatttgttttaaattttaaaaaatgcaaatagagaaaatagattttgttttcttgtgtaattgttatgtctttgatttgcaaaaaagtatgtatcatctttcttttgcacaaatatcttaccagattttttatttcttgtggtgctggacagtatggaattcagcctttaattgggaatattttttatattctgttcttttttttgttttgttttgctttttttttttccagagacagggtctcactgttttgcccaggcttatctaaaactcctgggctcgagcgatccttcctcctcggcctcccaaagtgctgggattataggcatgagccatcacgcctggccttatattctgttttataatggataatagtgttcataagagagagttctcagtgtaaatagaatctttgcataatgtaattttgcacataactgctgctaacatatttgtagaattcttgtattccaacataatattttaatttttgttaccaattttcagcgtagttcaataatttccatttgcaatttttaaattgtgttactaatattaatgtaagctcaatgagggcagagatttttgacgcctattggtgcctagaatagtgcctgacacatagtgttcaacccagtttttttaacaactaactaaattaaaaaagatagtctaaacaatgatggttcattttcataaagcttgaagtcaaagaaccttttttaagaatttggtctttaactctaccatttttggaacatggttcaggcccatcactgtcatttctggaaactcttcattataggaaagtgggctacattattccttaccagatgaggtctttaaacccacaatttggctaagaatgaaataatcaaatcacatgtttagtgcaactacttgtgaacacccttacttagaaatattctgagtggttataaataggttgaaagggcagccagaaagatcatgtctgccatccagtgtttgctgggagctgaagcaggcatttttccctcggctgactggaacaagttgtccatttgggacatttattcagcaaacatcttgtgcgttctccttgcccaggactatgcaagtacttaaacactgtatagaaaaaacaaaattgaagaggatactactataacctttgtggaaaaaagtttaagcctagcaggaaggatttaatttcatttcttatttttctatgtatataaatcctctaaatttgttaactgataaatttgaaaaaaactgatgtttggtgtaaaactttttttattaaatatgttctttgcagtctttaattttttgttaatttctgcttcaccgtcttccttttgataatccttttcagtttgtataaaaatttgaggtctctcaaatttttattgacatctctcaaattttgttcagaagaggcaaatccatagagaaagaaagtaaattagtgactgttaagggctgtgagagaaaaaggaattaggagatatggggtttcttttttggggtgatgtaaatgttctgtaattagtggtgatggtcacacaacattgtgatactaaaaactactggattacatgccttaaaatggttaaaatggtttgatttaggttatgtgatttttatatcaattaaaaaaatttttaaagatgtggtacagtgagaagtaaattcacaaatctacgttttcaataaaagtatcactttagtcattccacaggttgctaaatgcattataatcatatttttttacttcaggatgctcggaaagcatgtaatgatgcaacgcttgttcaggtaaagttttgtttttctttatttcattttggtaactcataaaataatttgacatagaggcaaatgacattcagattcttgtattagtgcttaattgaaaaaagttaaatgaaatctctgtgtaaaagcacttcgtaatttgtcaaatgctatacagtgcgagtgctttttaaaatatattgttaaaatagacatctatggaaaaataaatgctataaaaatataccagctataccaacatggtaaaacctcatctctactaaaaataaaaaaaattagctgggcataatcccagctagtcgggaggttgaggcaggagaattacttgaacccaggaggcagaggttgcagtgagctgagatcgcaccattgtactccagcctgggcgagaagagtgagacgccgtctcaaaaaaaaatatatatatatatatgtatatatattttcaaggccaagcatggtggctcatgtctgtaatcccagtactttgggaggccgaggtgggaggatcacttgaggtcaagagtttgaggccagcctggccaacatggtgaaaccctgtctctactagaaaaaaaaaaaaaacatgaaagttagctggtcatggtggtgcctgcctgtaatcccagctacttggtaggctgaggcaggataatcgcttgaacctgggaggcagatattgcaatgagccgagatccctactgcattccagcccaggagacaaagtgagactctgtctcgaaaaaaaaaaaattatatatatttatgtatgtatatatatatgtatgtatagattcatatagtttatgcttctttttaaatagtttctgattctttttggtataccctgattaagtgtttttttccttatgaaaactcttaggttgggaatgagatagtaagaggggtcaagaagactaatatttttaaaaaatcttgggaaggcttcatgtttaattaatattgatcattattattaaggaagtattttatgtgctctacaaatataaaattggctttcttacagttaaaattgtaaatgtttactgtgatcatttgcctctagatttttatttgtggctggttttttactaaagcatagaggtatatctattctttttagttaatagtctgcagaaggcattcttattatacatttatgtatattatttataacagcacataggattattttaaactaatcataattttcaggaacatattgatcccataacggctctgtggaattatatacattaaattaccttcagttactataaatgtactttatgtttgcttttttaactcctcactgtttctagttcaagttatctcatgaactatgattaaggtaaagaataacatttttgttgctttcaaaagattacatcaaatatggactctgtgggtcgaatacaaatgcgaacaagacgtacactgaggggccacctagctaaaatctatgctatgcattggggatacgattccaggtttgtacctgtcattacctgtcatttttaaactgttgcagaattattttcattaagaaccatcatttgcattttctttgtttaaaaacagaatatattcatgaagcgtttgcagaaaatgcatctcagatgaacatgctgctttcaataagaatattaattgactctttaaaagtataaacatttttaatatggaatccaggacaactgttcagaagaggattccttttctttgcagtggaacattgcagacattctttgttttttaaataggcacaaagcgtttttactgtatatgaagcttgaaatttcagttcataagcaaatacgtattgaacacctatgtgcaagtttttggatattgctatagtttgttattacataaattcgcaaataatggaaattacatgaaacaaaggtgtttgtactgaatacatcttttactccctcgactgcatcacagaaaggtgtgtgcttgaatgtgcaagctgaccatctgcaggtgcacaggcacacgcacagctgctacgtggcctacagttagatagattgctcatcactgtcattcactatgtgtataaggctacagcacagcctatgtttttccattgtctggcaatagcagatgtgtctgctatcacagtggtttacttgttcctttgatttggttaatcttaatgggaaatgcctaaaccaagaaacttctatgttttaatagaagttgcacatttattctcttctcccaggagacactaaaattataaagtagaagaagcctcaattgttgctctaattgggatacttgaccacaataatatagaacatgtgcctcttacgaagggatacataaaattatataattggcaactgacataatgtcttaatctttttctttttcttttcttttttcttttttttttttttttttgagacagagtttcactcttgttgcccaggctggagtacaatggtgtggtatcggctcactgcaacctctgcctcccaggttcaagggattttcctgcttcagcctcccaagtagctgggattacagacatccacaaccacgcctgactaatttttgtatttttagtagagagggggtttcaccatgttagccagcctggtcttgaactcctgacctcaggtgatccaaccgcctcagcctcccaaagtgctgggattaatcaggtgtgagccaccgcgcctggccgaatgtcttattctttttcttaaaggagttgaagataaaaataatttacctgttgataaagcaaaattttaacttaaaatatagtaacttgaaacaatgtttatggttcttgctttccttaaacgttttctgaagactgttaatcttcatagaaaaatgaaaccatcatccaggaacctatctcacatagtcttcccacccatccgtgttatcaatccattacttaatgttctcctcaactcttatgctgatgatgccaattgatttctaaagaattttctttagatgccatcctataccccactatcagatagatcttcccttttgtaaaaccttgtagtgattgctacccaagaatctgataatgttatttacctctagggaaaggaactgggtggctgatgataggcccaggaaggtgctttttaaattttcttctgtatatccttttttattttttgaattttacaccatggtgaaaagtaaaaattccaaacaaggctgggcatggtggctcatgcctgtaatcccagaactttgggaggccaagcgagtggatcacttgaggtcaagagttcaagaccagcctgaccaacatgttgagatcccatcttaccagtcgtggtggtgcacacctgttatgccagctattcgggaggctgaggcaggagaatcacttgaacctgagaggcggaggttgcagtgggctgagatcgtgccattgcactctaacctgggtgtcacagtgagtgtctgtctcaaaaaaaaaaaaaaaatccaaacaaaacaaaaaatttagtggctaaaattacttaggagttcatactctttagtttaacaaagctttctgcagtttaagcccagtctgcttttctcaacttatttttccattttctcacaaactgtactactggaagacccacaattcctgaaacaacactcagtgtatttttctacctgtcattgatcttacatagctttctcctaaaatacagccttttctgtatctttagctctcaacattttctttcaagactcattctcttgtgattaactcatctagccattgttcctcctttactctcctgtggcatttattttatacccctcttctgacagtttttacttacttgatttaatataaatatgagtaaatgtcttatcttcaccagatggtagaggcctcaagagcaggcgatgtatcctgcgttgtacctctagtattgtcatattctcaggctctcaattggtgtttttagattggatgaaatatggttgttaggcttctatgtacattcttgtcatgaaatttaagtaagtcagtaagtactaaaccagtcagctaatatccacccaaatcttgtataactaagatgttgttaccacaaaaatgtttaatcatagccagacatttttagtcagttgctaaattttattttatgaaatatgttcaagatttttggcatgcagcataaattttttaaaagttggaagaacattttttggtatcaagtttttagttggaaaaattgtatttttctgaattattctacattaatgcaatgcataaccaatttaagctattttttccctctaagtgtcaaattatttttgtgtttgttcctctaggctgctagtcagtgcttctcaagatggaaaattaattatttgggatagctatacaacaaataaggtagaatttcttcataattcttttaaataaccttatatttgtttggctgttcaccagttctttcctttattcttttacctcaaacttaaattgctttctgagataaatttattgtttattttaatctagttcttctcttttgtcttagtgtttacttttaatgtttaaccctttttcatttccaaagatgactctatgttttactagagggctcatatttaatatatgaatattagaagagtaccattttacatatactaataaatgatttttaaaaattcccatttcctaatatgacaaagaccttgagatttttatttctagttttggataagttagatggctagtgggaagctcttctttggcccgctccaggcactgatttgtgcttctggactttttagaagatacagtagattggaggtaaatgacaacttacgtagatctcttggtggtaaaagactgtggatggtcctaatacatccactggaaggaatccccagtttaaaatagttgagtggtgaaaaagcttcaggaatactttgataagctaatacctttatactctgtgtatacatattagtatttttattaaacatttgaaaataccattttgtgaaataataatttcaacctgattgagattttaaagctagctaagacaattttgtaatataatagtttttctttattaatcatcattaagcacattatctttcaactatattttcataaaacaaaaaaaatgtattttaagcgtattattttaggttaagtgagagcatagtagtaatcctgccacgtgttgattccctgtatggactgtttagccgtggtattctcatacaccttttttccatctgaccttcaaatgattggtgttagggtaacaaggcagcagacagtgttgtttctagagcaataaaaaactatcaccattgtttgaatgagatcccagaataagggcctattaatagagggatgccagtgttgtcttttcatggaagactcatgtaatcgactctgatacttgctaattatttccctagttcttgttcagagttatgttggaggaaatttctcttctgagcactattacaaaagtgaaaattctattaaaacctctaacattttacacttaatttttcaaatggcagtatattaaccttggaacatctttatgttcattattttattaagagaattatttccaaaaagagcactttttgactcaaatgatttgataatacaaaacaataggcattttaatgtgcgttagtgttgtatttttcatggttcactttctcaagccattacattattttatttgacttatctttcttagatgtgtttaatttttaataatatttacttcattgtaaatgggtttatgcaatagatgactgtttttgtaatctgagtgatgtgtggtgtgtgccctacagatgcatgctattcctttgaggtcctcctgggtgatgacctgtgcttatgctccctctggtaattatgttgcctgtggaggcttggacaacatctgctctatatataacttaaagaccagagagggaaatgtgagagtaagccgagagttgccaggtcacacaggtgagcttccctaaatattctttcccaccacacgattccttgtgtggaatgtgctgatcaaggacaaatgacagattgtgctcggctggctaaaggatgaggattaatcgggtgggaatgaaattattatgaacaaaggaaacattaactttttatagtcatacaaacgttgatcataattttatttttcaaaaatagctgtattgtttttgtaaaaaatgataaatttactgcacaaaattcaaactcatgaaaaataaagcaaataaaatgttctccattttctgctgccatataacaattatgggattgtggcatctgtactcaattacataattgaaagtatgcattaaggtacattagtgaagtgcttttcaccatgatagtgtattgctttgtttgccagtgtgcccatcatagttcaatagtgtagtattgggttagtggtgttaatcaggaatttattgccacttatctggtatctatccatctgaatttttagccatactatttgaccatgcttttacaaaatctctagaatggtgtttttctgacatttccatattttgaaacactgatgaatgctaagcattcaaatgccacatctttcataaagtcttcactgttgttcttctgatttcttacaatattttatttttttaatattttttatttgaaaaaaaaatttttttaactgctccttgcagagaagggctaactcataggcggtgcacccagaggcatcctctcacagtattttaaaactatttctccagggtgcttaacacagtcggccatagattatagttcttcccaaggtaattgtcttaggtggcaggggctgtgtcttattcaatttggtaactttcagagtacccagcacaatgtcattaacatagttaatgcctaagaatggtttgtggataaaatttggtttatagacaatgtaggatttgaagtaactaaaagtagaactatagactatattgacaaacacttgttgcccaagtattctatttttaaaaatatatattgctatttcacatggtaactgagttattcaatcagtgataacctaaaatttgctactctttatgctgtagggtacttgtcctgctgtcgttttttagatgacagccaaattgttacaagttcaggagatacaacttggtaagtttattccagaagcacactgattatgggtttgagggtggtagcaggaactgacataagaagaagtaattgtcatgaaattttgtttttaattacagtgctttatgggacatcgaaactgcccagcagaccaccacattcactgggcattctggagatgtgatgagtctttctttgagtcctgacatgaggacttttgtttctggtgcttgtgatgcctcttccaaattatgggatattcgagatggaatgtgtagacagtctttcacgggacatgtctcagatatcaatgctgtcagtgtaagtgaatagcatttctagagaaaatttattatgcatttaaagtgttgagctctatggcatgattttaacaacaaattgccttcaaggattcttacaagtaatgtgctcttataactttgaatctccaagtcataagggtttttgattttttaaaaaagaaagcttcaattcatagtcctagatcttttttgttattgttggatttttttttgttgttatttttttgtttttttgagacagtcttgctctgtcgtccaggctggagtgcagcggtgcagtcacggctcactgcagcctcgacctcctgggctcaagcgatcctcccacctcagtctcctggtagctaggattacaggtacacaccaccatgcatggccaattttgtattttttatagagatggggttttgccatgttgtccaggctggtctcgaactcctgagctgaagcaatcttcctgcctcggcctcccaaagtgttgggattacaggcatgagccactgttcctggcaacctaggtttttaattgctggtgaatatcactttttttttttttttccaaagtggagggattatcatgagtaaacaagcagatcgtggatgttctaccagtgaattcagatgagaaaaaagtctcgtctttctgggaccaaagtgaacaacccaaagagagaacaataaggatgaaaaaagcagctgattagtgtggagtatagcttttgaagtcagtgcaacccgggacctaatcttagttctgctgccattaagcacctgtgtgaaactagtcatgctgcttcatcttcgtgaacctcagattcttcagtttttaaaatagggataataccacctacatcagagaatggtgtggagactaaatgaaactaggtattagatgctcagtaaatggtataaattattattattattatttagagacagggtctcattccgttgcccaggctggagtacaatggcatgatcatagctcacagcagccttgaactcctgggctcaagtgatcttcctgcctcagcctcaggagtactgtgactacaggcatacaccaccacacctggctagtgtttgtttgttttttttaatctttggtagaggcagagtctcactatgttgcccaggctgctcttgaactcctgggctcagcgatcctcccacctcagtcttccaaagtgctgggattacaaggagtgagctaccatgccttgctgtatcagttatttataagctacttcgtatttaaaaaaactacctaaacagaaaaccataaatagattaagccaggtaaaaagtactcagtatataggaggataagctagtcatagatatctgtaaattagggtaaagtgaaaataacattttgaatgacaatcaaaatgattatcaaatggtcagaattgagggggaggggtgttaaaagaaggtaggatactgcttgagttaggttacctaagcagatcagatgccaaacagtacagatatgactagaatgtccaaaagtaccataattgccaaggattttaatgtttgagaaacattctaattttataacaagacatttttggggaaaaattagtaagcttttctttatcatacacttattgaaagtcactttttttacatgattttatagaaaacatcagagaaagtaaatgctgtgctaaccccatccccacctctttgccgtaggccaacctggttagaataatagagttttagagcaggcaaagttaaccctctctatctctcagcccattacttttatcaagttgagatgttctctcataatttgctaaagtctttatgaggaatgagtgttgaatttttgtcaaatactttttgtccgtctgttgagatgttcgtgtggttttttttcagccacttaaaatggtgtgtttacattgattttctcctgtttttttttttttgtcaaaacattagtaccatcttttacaaatataagtaaatatagaggcttccttttggaataaaatgattcaaacaaagatactgtatatataacagttttccttttttcagatgaaattatgaccaacttcattatatttttataatattttgaaattcagtgatgattttaacagtgacatttctcacactgtttagaatgttaggcttagaaatgaaactataatagtttcatttgtggctgagccccatatattcactgagtgagttgctgaaattttccatttggctctatatttgtggggcctctaggtgtctctcagcagtaaagacacttaataattgtaaactgtgattattaatttcattaactcagtgccagattcagttatttctatcatagatcaaggcttttttcctccccagcccctactttattaaggtataattgacaaattgtatatatttacagtgtataatgtgatgtcgtattagatatggggctatttaggttatccatttctttttgagtgaactttcaaagattttatctatatcatctacattgtcatatttattggcttacagctatttattatactctcaatttttttgatatctatagagtttacaggatatcctgctctcatttatgatgttggtaatttctgttttacttttttcctgatagtctgggactgtgggttgaattgtgcccatctaaaatttatatgttgaagtcttaaagcccaggacctcagaccgtgaccttatttgaaaataaggttggtccagatataattggttaaaatgaggtcataatggattgggtgacactaatccagcgtggctattgtccttataaaagggggaagtttggagacaggcaagcatagagggaagatgatgtgaagagacacaggagaagacagtcatctacaggacagtgagaagattacacatctttctgtcacagtcctcagatatcttggtttcaagtttctagcctccagaactgtgagacaatacattccttttgtttaagccacccagcttgtggtgctttgttatggcagccttagcaatgaacatatctatctatctatctatcaatcaataaataaatcaactatctcctcagagaaccagcttttgttctgagtgatactctgttgtttttctgtttcattgatctttcactctcatctttattatttcttttctactgcttacttggtgtattagttcgttctcacactgctatgaagaaatacctgatactgggtaatttataaagagaagaggtttaatagactcacagttctgcatggctggggaggcctcaggaaacttacaatcatggtggaaggcacctctccatagggcagcaggagagagaatgagtgccgagcgaagggggaagccccttataaaccatcagatctcgtgagaactcactgtcacaagaacagcctgcagggagaccactcccatgattcagttaccttccaccggctccctcacaacacgtggggatttggggattacaatgcaagatgagatttgggtggggaaacaaagccaaactgatcactcggattcactggcttttctttttctagttttttttttgttttgtttttttgtttttttttttgagacagagtcttgctctgttgcgaggctggagtgtagtggtgcgatctcggctcactgcaacctctgcctcccagtttcaagcaattctcctgcctcagccttcgaagtaactgagactacaggcgcacaccaccacgcccagctaatttttgaatttttagtagagaaggggtttcaccatgttggccaggatggtctcgatctcttgacctcgtgatctgcctgcctcggcctcccaaagtgctgggattacaggcgtgagtcacagcccctggcctttttttttttgtttttgagatggagtttctcccttgttgcccaggctggagtgcaatggcgtgatgttggctcaccacaatctctgcctcccaggttcaagtgattctcctgcctcagcctcccgagtacctgggattacaggcatgagccaacacacccggctgatttttttgtatttttagtggagacgaggtttctccatgtggtcaggctggtctcgaactcccgacctcaggtgatccacccacctcggcctcccaaagtgctgggattacaggcatgagccactgtgcacagccttttttctagtttttttaagatagaagctgatgtcattgatttggaactttttaaaatttctaatactggaacttaaagccataattttttttttttttttttactgggtttcactgtcacccaggctggagtgcagtggtgcagtcatggctcactgcagcctcgacttccctgggcccaagtagctgggtatacaggtgcgtgccaccatgcctggctattttgtgtgcgtgtgtgtattttttgcagagatagggtcttgccatgttgcccaggctggtctcgaactcctgggctgaagtgatcttttgtcttagcctcccagagtgctcggatttcaggagtgagccaccatgcctggcccttcttcatgtttcttgtgtttggatctatgagtttctttttttttttgagtttctttctttttcttttttttgatactgactctcgctctgtcacccaggctggagtgcagttgcatgatctcggctcactgcaacctccacctcccgggttcaagcaattctcttgcctcagcctcctgagtagctgggactacaggtgcacactaccatgcccggctaattgtttgtatttttagtagaggcggggttttattacattggccaggctggtcttgaactcctgacctcaggtgatctgtctgcctcggcctcccaaaatgctgggattaaaggcgtgagccaccgcaccgagcccctaatcagatttttttttctgtctcctctcttccttcctttggagactttaagttacatagacattaaaccacttgaagttttcccagagctcactcatgttctgttcatcttattgttcaggatatttttctttctgtattttactttggatgggtcctattgctttgccttcatatgtcttttctgttgtatctaatcggccgtgaacccatccagtgcacttttcatcccagacgttgttgtccttgtctgttaattttatcttctgtgactttttctgtttttttcaactgattaatttttctcctaattataggtcatattttcttgcttttttgcatgtctggtgaatttttattagataccagacattgtgaattttaccttgttggatgctagataattttatattcataaaaatattatttagatttgctctggggcatagctaaaatcagactggccaagttaagttacttggaaactatttgatcattatagggtttgcatgtaagttttgttagatgggaccagagtcacaccgtgtgtgcttaattttgccccactggtgaggcaaaagacttaaaacccctcttctcaagaaattacgaggtttttccggtgtataatgaggttattatgaggttttccctctgtctggaggggataggcattatttttgtcctatgtacacaccagggtttgtttcctgtaatctttttgggtgtcttttgcagcttgattagttttctcacacggctctgctgatcggtactcagttgactacctaaaggatgtcctcagcatgcctctggagttttctctttgccaagcattgtcctctctgacactctctgtgaactctagctgctgtggacttcttggattcccagtgctttctcctcaactcagggaggccagtgggctccagctgcgtttctcttcccttcaccatgacctttataaactttcatagtaagatggtagtaaggtagtaagatggagcagctgtaggaatgatcttatttatttatttacttacttattttgagacagtctcattctgtcacccaggctggagtgcagtggcatgatctcggctcactgcaacctcagccttctgggttcaagtgattctcctgcctcagcctcccaggtagctgggactacaggcacccgccaacacgctgtgctaatttttgtatttttggtagagacggggtttcactatgttgggcaggctggtcttgaactcctgacctcaggtgatctgcccacctcagtctcccaaagtgctcgattacaggtgtgagccaccgtgcctggcctgttttatttattgtttctcagaggcacgctccttcgttgactgatatccaatgtttttagaaccatgttttatatatttttgtccagttgtttttagttttttaaggcatggagcaaatccaatcactgttgctccattttggctggaagcagaaggatagccaagaagtaaatttttaaaaaatatcttagttgaagaaaaacattgagtagaaggtccaagggtcttatgaagtactttttaaaaagtaattaaaagaggggccaggcgctgtggcttatgcccgtaatctcagtactttgggaggctgaggcaggcagatcacttgaggccaggagtttgagaccaccctggccaacataatgaaaccccgtctctactaaaaatgcaaaaaaattagccaggcgttgtggtgcatgcctgtaatcccagctactgaggagactgaggcaggagaagcacttgaacccaggaggcagaagttgtagtgagctgagattgtaccactgcactccagcctgggtgacagagcaagactctgtctcaaaaataacaaaaaaaagtaattaaaagaaaccaacacatcctgttgaatttaagagtatcaaaagatgggagaaaattcaagatgaaaacgcagattacctagatataaaagattaaaaaccaagctaacctcacactttttcacaatagacactgctgaaaggctcctgaacagtatctgccaagtgttaagggagaaatactgtgacccaataattttaagtatcagagatcatagtcatgatgtggggaggaaatacactacatataatacaggataagagattaagaccaagaataatcacttaaggcattacacgtaaatgattactgctattaaaagatacagaataaactgaactataatgttgtatgcaagaaacacacctaaaacaaaatgacccaggaaggctaaatgtaacagtaagagagtgggtaagtcataaactggaaggaaatctgtagtaatattactatattactattaaccgaagtagaattggagcaaaaactataagatgagagaagttttatcttaatgaaagggacagtagtgatgctataacattgaaattcataaaacaaaagccattaaaaattcaaggacccaaaacaccattgtgtaggagactttagtagacaacttggaaatactgatatcttaagaaggcacgaaataagatgctgaggatttgaatagtgttatttaataatgttgacttgagagtatattgtaaattgcaccatatttgggttttaccaaatacacagtatattacctttctaaaatctgaaaaattctgaattctgaaaaagaactgtcccgaggggtccttataaccctataaggattgtggaccttttatctccttgccattcgttctacaacagccacacacacacacatatatattctataaatattagtacttgctttaaatgtttcaacatgacatatggagaaccagagccagtatttgttgaatacttgctgtgttctgaacaatgggctgtgtactttgcatatgttatttaattcagtcttaatcaccactttgaaatggaatctgaggctcaaaatatttaagaatctttagtgcccaacatcgctcacctggtaggtagccaagttggaatattaatctagatttgtctattattacattgcctcctatgattgtgcatacatctgtagaataaatgtttgttactttcctgtctagtttttcccaaatggatatgccttcgccactggctctgatgatgccacttgccggctctttgaccttcgtgcagatcaagagttattattgtattctcatgacaatatcatctgtggaatcacttctgtagccttctcaaaaagtgggcgtctcttgttggctggttacgatgactttaattgtaatgtatgggacacgctaaaaggagatcgtgcaggttagtaaataagtccacattaggttctgattttcaggaagcgtgaagaggttcccatcagttgtgttctaggcctccatggacatcttggagttgtggaaagtggtaacccgatggttctcatcatgttctttgttgttaccttttgtttgtggttataatccataagccatatttacacttttgctttctgaagaatcacactgaggtctgtaatattttcttatttggtagacttcagaattaaagatggatagtgaatgtgattcagtgtggtcttttagaaatcacacttttcttatcacctgacaggaaacattgtaactgctggttttcttccttctgaagcagatcttgtatgggacaggacatagacctgtcgcttcccttagccccataccctgagtcctcctctgcagcttctacaagatgacaatacacattaagccatactggggactgtcattaataacaagtcatacagagtaatttttagctatttttaaaaatcaaaattatacttaaaggaatccagttgtcctatatagcttgttaccaaaacacagcagttgcttcatccccaacccatagtttctgctccccaaagtaactacatttagtaatttacctacccctcctctctccccgccccctttgttttgttttgttgggacagggtctctttatgttgctaaggttggtttcttcccgcctcagcctctggagtagctgggattacaggcttgaatcacctcacctggcttacttacatatctctaaataacatgcctgtattgctgttacttgtttaaaaaaataaaaattcaggtgttatctgttgttgacctattatcatggatgagaagggttgggttttaagctgctcctgccgtagccatgttcttcccaaccagtttttcccatatgatagattttgtttagaaccacattcactgtttacataattccgactttttaaaaagtcatttgctgctgagccatgagatgtgttatgacttcttttgccatgcagcttttttgtattttctagagttaattttttggtttatattcttagtttctatgtgcttctcactaatgaatcttcacactttatgccagttttgatgtgtctcggagcggatccattttcgttcattgtgctgggtatttagtgagcctttttgatccggaaactcattaccctatagaacagggacatttgggggtgggggcttgttgaattttatttcttctctattatcatcattccctttttctagatctcccattatgttgaaaatgggcttcctggactgatccttttgactttttttgttttttaagaatttttattttacttaactttattttattttattttatttttttgagacggagtcttgctctgttgcccaggctggagtgcagtggcatgatcttggctcactgcagcctctgcctcccaggttccagcgattctcctgcctcagcctcccgagtagactagctgggattacaagtgcacaccaccacgcccagctaatttttgtattttcagtagaggtggagtttcaccatgttggtcaggctggtctcgaactcctgacctcaggtgatctgcccacctcagcctcccaaagtgctgggattacaggcgtgagccactgcgcccggcctgactttttaattatattttttattttccatcttttttgctttatcttctgggaggaaacctcacctcaggtttccacccttctgttaagttttggttttcattttcgctaccatctttttaacttaagagctattattagtgaaagaattttttttttaagtttcttcttcaagcatcatcttttgtgtttccaagttttttttttcttcatttttggggtttcctgtctttatttttagaatatttccttaaaagtgttaattcttattcatacttaagagcgaggcactaaaaccatttgaagctctgggcacgtggctggtgtgctgactcggcctccatttactctaggctggccgttcactgaggaagctttgctgtgtctgcctttctgcctttcttcctttttccatcttccactttcctccatgaagtgtataaactggctgccagtttgagggctgatttcaagagaaaacctgagggaccacaacatttagctagtaaactttattccccatttcagcacagttttatcaatcgcatctgtgcctgttttcttccagtcaggagaccctgttttaccctttcctctgagtgagtctctggccttacgccacagcgcaggatgatctgtcacctgactgcagagtggaggaaggggacacctgggggctcttactgattgatgaacactttccagcacaatcttattttactctgcctttgcccctacctgttccagagatacctggttctacctagtagggacacttttggagaatctgcagtgtaattttgttacttggcttactattcattttgaactcagtattttggggttcattaacacagttgccaccatccagcttacgaaagttcgttgccattgcctgctctcatctcactgtccttgtggatttatgtccttacccttttaacccccgctatgcagttgttggggttcctgagggagcagaggcagtgtaagttttttccaggaataattttctacaacctctttcaagagactgcatggtttgcagttttacactttgcaagtagattcctggaagtattccgttgcttaaggccaattaccttttaaagatatttggtgttttgcctggattgaaacaattagtatccataacaaaataaaaatgtgcttgttgtccacacttatatgcttgaggtttagttttgctttgcctacaagctggtttcaggttggctcaactggaactttgaacttaaaattggatcctgacttgtgaattgctaattcatttccctctccagtgtgacttaaagtatttagccacaatgttcattttttttgttatttcaactcataatggtaaattttcccattgccaaacatggccatactggagatactatagagaatattaagagttacaagatgaacttctgttcctgattgatcgaaaatgatatgcttaagaatagagagagagaatgcaaattcaaacactgtatttaaaaattttgagcatttgatgtattctaatttttcttattaatcttactgtatttcttgttttcttccaaaatactggaaatacatcaaatgagtttaatgtgtgaaagaaatgaaaactagatgagtttcatggtttcagaaagttataaccaataacattccagagtttggtgattagcataagaaagtaaatgaattatgttggtattcttggaagcagtgatgtgaggcagctttgttcttacgtttttgtcgttcctgtggtgaagggctccttcagtgaacttcattgaaaatcttgtttttgttgagaatagcatacatagctcagtagcaaaatttggaatatcgagaacttattagagatgtggaataattgtctgcatatgttttcctagatataagttgaattataagatgatttttcaaaaattaaaaccacaaattgatgcatgtcaaaattcaaataatccaaatttataaatacatccagcttactcctaacttgtcttcttactcagagaaatttgttgttttcttttaaattattattattttttaactgatgaactttcaagaaaactggactgatagtttataagcacccttttaaatctctgcatatacttgtttaattctaaaaccctacaattgccaattttttactgaatttttttttcaggtgtccttgctggtcatgacaaccgtgtgagctgcttaggtgtaactgatgatggcatggctgtggcaacaggctcttgggacagttttcttagaatctggaattaacagtgtcatacatatttgttctccattgatatatctggagaaatcaatgctacagcctatagctgtgaaaaaattctaccttatatttgcaggtgaagatttttctattagattatctacaaaaacaagctttcagtaaactaccaaaaaaaaagtgggggtggaggaaaaaaggcaaaggcgccttctgagatcaaaaggaccagtgtattaatttgaggggttgggttattttaaccttggtgaattgttgtgtgtactcagagtgtattttctttgtgtagaacagaatgtacacattatagcagctcgccattgtgtttgcattttttaagaagtacatttttaactttgtatacacaagaaatgtcatatttttgagttttgtaatggaagaaccaggcacagaaacagacagaaatgatactgtatgtgtgtgtatttatgtctgaagaaagtccccttgaattctgatatctctttgaatctaagagatcctgatagcttcatgtttaagagcattgacaggtggggcacctctgaggggagttcattgtttctcatgcatcatttgccatatactattaatcaaagtgcttgctttcagtcctttgaggggacagataatctgaaggccagagattagagatttcactgatattttggacatacataagaaacatcattataattaataaaaagtaggtaatagcatataaatggttcttgacattttaaaagcctggttatgatcagttgacactttgagtacccccctaaatagctggactttccttttcatttcatatttggaactaagtttgtagcgtatactcatctttcagaagtttggtaaacattgggattgtccctgcatctgaacatctttcccagtgctatcagtatacatctagagaggaaatgcaatgtgacagtgttacatttggagagaagtgtgaaatctaaccaatcgctagcacatatttgttgtaatacggtggtttatttcatgtttgcatactataaaatctgaattgatgtgaaatatctgtgcctttaaatttcttaaacctttaagctttttgttctgttttgcaacattttgtagtatttcttcccttccttagcacaaaatactggtttctaagtggttttgcttcaaaggatgtctagatgtaagtgattccacttaaagccaaaataaaaattcctaaagcagttcttaaaggagttagagagctatattaaacagtttttctgtggtataataatgtgtctcttactagaagtcccccacgaccaagttaaagatacttttcctgttggattctcttttacaaataagtctaaatgactgataatagaagattgttagtcttgcttgatggtaaagtcttggattattctgatatatagacgtgcattgttttgtaacttagttacttttcagataggtctgtgttaacttttgaacatgtgtaacttaacctaaatactcccaaactttacctctaaatttttgtttttatgttgtgaatgtgctaatatgtgcatcaactgtaaagatgtatcagttttattaaaatcagttgacaattagaataataaagtggataaaggcaaattaagatataggaccaaaacagaatattgtagatggcagttatgaatgtatatttatattttgattaagatttctattaactttttggctgggcagagtggcttacacctataatcccagcaatttgggaggccaaggtgggcagatcacttgaggtcaggagttcgcgaccagcctacccaacatggtgaaaccccatctcttctaaaaatacaaacattagccgggcgtggtggcacattcctgtaatcccagctactcgggaggctgaggcaggagattcgcctgaacccgggaggcagaggttgcagtgagccgagattgtgccactgcactccagcctaggcgacagagtgagactccatctcaaattggaaaaaaaaaaaa

SEQ ID NO: 109 - DNA, 96682 bp, Homo sapiens
gaggtataagagcctccaagtctgcagctctcgcccaactcccagacacctcgcgggctctgcagcaccggcaccgtttccaggaggcctggcggggtgtgcgtccagccgttgggcgctttctttttggacctcggggccatccacaccgtcccctccccctcccgcctccctccccgcctcccccgcgcgccctccccgcggaggtccctcccgtccgtcctcctgctctctcctccgcgggccgcatcgcccgggccggcgccgcgcgcgggggaagctggcgggctgaggcgccccgctcttctcctctgccccgggcccgcgaggccacgcgtcgccgctcgagagatgatgcaggacgtgtccagctcgccagtctcgccggccgacgacagcctgagcaacagcgaggaagagccagaccggcagcagccgccgagcggcaagcgcgggggacgcaagcggcgcagcagcaggcgcagcgcgggcggcggcgcggggcccggcggagccgcgggtgggggcgtcggaggcggcgacgagccgggcagcccggcccagggcaagcgcggcaagaagtctgcgggctgtggcggcggcggcggcgcgggcggcggcggcggcagcagcagcggcggcgggagtccgcagtcttacgaggagctgcagacgcagcgggtcatggccaacgtgcgggagcgccagcgcacccagtcgctgaacgaggcgttcgccgcgctgcggaagatcatccccacgctgccctcggacaagctgagcaagattcagaccctcaagctggcggccaggtacatcgacttcctctaccaggtcctccagagcgacgagctggactccaagatggcaagctgcagctatgtggctcacgagcggctcagctacgccttctcggtctggaggatggagggggcctggtccatgtccgcgtcccactagcaggcggagccccccaccccctcagcagggccggagacctaggtaaggaccgcgccgctgcaccccttcgcctctcaggtggcagacggcaggccggccaggccgcggttcccagtccacctcgatttcctcccctctcccactctccgctcagccttcccacctcacttggcaccgttgcctcgcgcccccagcgtccccggaaggccggtctgaccccgctagggagagcagtctccagggggatgcgccctggtgaggggtgtgtgtgcgcgtgagtgtgcgtgacaggaggggagacagagacacccagggtcacgggtaaggaccgttttgtcagcgccaccctttctttcggctttcaatttttgttctccttaaaacaaatgttttaaaacaaattccacctcctcctcctttccacccacccacttcctcttgcccttgggctgaaatccttccaggttgttcagcttaatttctcagtggtggtgataagaacagtgctcactagtcttagaaaacagccgcagagacctaaacaataaccgactcccccccccccctctgggtttttgcagatgtcattgtttccagagaaggagaaaatggacagtctagagactctggagctggataactaaaaataaaaatatatgccaaagattttcttggaaattagaagagcaaaatccaaattcaaagaaacagggcgtggggcgcacttttaaaagagaaagcgagacaggcccgtggacagtgattcccagacgggcagcggcaccatcctcacacctctgcattctgatagaagtctgaacagttgtttgtgttttttttttttttttttttgacgaagaatgtttttatttttatttttttcatgcatgcattctcaagaggtcgtgccaatcagccactgaaaggaaaggcatcactatggactttctctattttaaaatggtaacaatcagaggaactataagaacacctttagaaataaaaatactgggatcaaactggcctgcaaaaccatagtcagttaattctttttttcatccttcctctgaggggaaaaacaaaaaaaaacttaaaatacaaaaaacaacattctatttatttattgaggacccatggtaaaatgcaaatagatccggtgtctaaatgcattcatatttttatgattgttttgtaaatatctttgtatatttttctgcaataaataaatataaaaaatttagagaaccttagagtttggtctatatttttaaaactaaagattaagttggtggtaaatacctgcttgtttaattctagaggcacccaggagggagggggcactaatataaacaaagcaatgaaaaactcaaataaagcagctactgacaggcacaagcatgttattttaaaagacagctttattattattccagtttggtattcagagggcttagtagcatctcttcatctcttactgtctccaaacagcaaaaacttaacaaatttgctattcacctcctttttattttgaggtgatagttgttaaaacagttaaatgcaaataaggagtataaaacctgcactattctcttattatgtactttttgtcatgctcttcactctttgtgaagattcctaaataacaggttcttttcagtgaaaacatatatagtgttatgaaaattatctatacacatatagaaatgaccagaaatgcatagaaaataaagtgtaaatcagcagaaaagagaaaattccatttgtaatttgcttaactcttctctcatgaatgaatatgacgtttagtgtcatgtttgctaaaaagaaaagttaatatatcgctatattgacgctatttgggaagcatcattctttttttatgtgtaaagaatataaggctgtggaataatatacaaaaatgaagatcctgaactttcagtatccttggtaactggatataatcacagttggaataatcacagttttaaatactacagctatgcagttactagtcagttcattagcgttatattttatccagaattacacagaatttttccctggtgagatcatacatacacacacacacaatctgaagttaagtaaaacaataatgggcaaacgggggtgtttgattttttatttcattctgattatttgtgggccaggaacatactggcttttataattaacattattagaaatagtgattttgtatcagttcttagcttttacatccgatttactgcatccaagtgtaactggggaagctttcaaactggaaaatcattttggtgcctgtttcaaacaatgactaataagtgtatgtatccaaacagatcgtttttgcttagctcaggtcaaagttattttattgcctgaaggtttttgttttcttcttcacacagcaccatagaatgctgacataagaatattatgaatttattgttaatatttcagactatattttacaataaggagtctgcagcattgacttgtattaaaaggttagtgaaagcttggagaagtattattatttttttattttgatagtcctttagcaaataacagaaagggaaggcgattatgtgttggtgtatttgttgggggtgtgtgtgtgttgtgtgtaaggcaggttagaaatgtaaggagggtgccctaggaggatgagggaaagcattaggttggtaattcttttttgtatgtatcatccaaccacctccattttctaaattattcatggggagtctccttgttcactagcttggtctgactatttgatatttcagatttcttaaggtacaccaggatggagctggccatgactgctgagaaggtaattgttatcttaactctggatataagaactagatgtgtcaaagaaaggtagctctccatttgcctttcttttatttctttctttttttaatgtgttttgctttttctacttttttcataaggggaaacactttggagaaaagcaaatgccatatttatagtaatattaaatactaatctgaaggtaatgtttccccccagattttcagagaaataaatgaatgaaaaaggtggtaattttattttgaatgaggcgactgcacaatgaaaaatattaactactggaatgcagtttccagcttgcagattctaatccctacccctgtatacacaagacataaatcgtgaaattcttttttagaatagaaatgaagccacctgtttcttttcctccaccattatatcttcttttgattttatgttatttcattttatttttgctacctacccttatttaaagaacacatagaatgaattacctcttgttttcggaaataagaagctaaggctttccaattaatgtgttggttcacttgggatctttttccttcagaatgcatttgctaggggaaagtattgtattaaattgtcttgggtaaattgtagaaaatttaatgtttcctttactgtgctattgattacttttatttataagttggtcagattgatagcctttagttataagaaagcagtaatttttttacccatatgcacatttccccttttgttcacagaagcacatgtccagatgataattcacgcacagttacaggttcccctccccaaagtggaacgtattattaataaaataatgttaaggagcagaaacttgcacgatgtgtgtaaattttttcccacactcaacaacggcacaagcttcttgacccttcggtcttaaggttcatattcataatggagctttttaagggacatttggcctcttgcaaaaaagtagagcattttgcacattccatggtttggcaaagtcagaactggttattttctctagaccggtatcaagttcttctcaggcatatgatttcacttgaagtcctgcccaggaatccttcaaagtgagcgtttgtcccgctctcatgatgtcaggcggttttccctgcatctgtaatttgaagaaaaataaacaaacctgcggggaacaaacgccacggaaacccaaacagaactccgtggggagcgagggtctcacctgcggcaggcgcgggagaggggcacgggcacggtctcccctgcgtgggtggcgggcccggctcgcgcggtggggagaatgacgatgtccgtatctccttcggtttgcgtggaaggcccccagccccgcgtctggccgctgctaggaggcggcggtgccaagtgtcagcggtagcaaggggagcaatagcaacagattcaggcaaaggcccaacctcgaatttccggagacaggcccacattagcgacagacaggggtcgggcggggatccccgggggccacttttgcagaattttccgcttatatgtcgtaaagagtgcgccgcccccagcaccagtgaaagtggaaggaaagtgcactggcaaagtggaaggagaaatcggtttcttcatattttctcaaagccggcaatcccactatttctcagaaaccttccaactctttgagagcccacgaatgtgcaaataggaggattattaactatctttatttactggacagcaaaggatagacccagtttaaattaaaaaaaaaaaaaaaacgacatgggatacattttccattttcccctcgcttttgtctcaaggcctaaggacgtgagcccacttaatgttcttagcaaatcaaagcacgtgtcctttgaagaaggtgtgtaattggagtttaaggcatgtatggaattcccagatgtctataaagtaagaaggagcatgtggcaggtcactggaaggtggagcaggttaaaatcactggcacagaggagccccctttagattctccttctttgtaaggaccaacgagataagccttctgaaaggttgggatgggatcatgatgaatattcagcttctggaatcagagtcatagtaaccatggtaaaaagcacatggtcagaaaacctcaaagaaaacactcaattatagccgggattttgtgggcgccctgcaacgagatcgtttggggtttgctgcagggagagcctgcaacagcctcctttcttgtttacgtggactcttttcttttccttctattttttttttctctcacccgctctcaagtttgtggatgtgtcctcctccttcgtgcgatttaggctgaagtcagaggaacaaaattctagattaggaaaagaaaaaacaactctaaaagcattcattccagaaggcagccttcttgggggaggggagatttccagcaagtgaaattaagtttctgtaaaacatgaagtttgcgtatctaccagagagggaaatctcacgaaatgactaccaccaaaatcagctgctcttttatttcactttattgaggaatatatagatgtataagggactatcgaacctaagtgtgagtttgtatggagtagtcggcagttttccttttggtttggttttggtctgaagacagaatcgaaatatgactttttttctggggttcaaaatgctaccctcatttacctgcacagtcaggcctgaagtgggagactaaggatcgggagtctctcaaagaacctggccacggcaaaggttggcactgggagggggtgatattgtgggaagctggaactggggccagcgacatgggggtgggaggtgggaggactggaacaaagtgcacccccacagaggccaccactgaggcaggcgggagagagaaagggatgccttggggggtgatgtgagtgtgacaagtgaaaagttaagcaggtacctgaaggaagtttatcttgcccagatgttagggcttttatgaaatgtcacgtgaaaggaacagacgtacaacttgcaaatggggacacgcctgtaaatacaaggaaggcaaatgcttggagagaaatccaggcataaatcatcaacctccttttctagatatctattttcttctttaaacatttgctttcagaaagggaagacacatctcaagttgttaagtgcatcttccagaagtcacaattccatctcctgcccaaaatgcgcatcccctaggttcctttggagagttagggtgagagatgaatttcaccatccccctcctgttttccttcttcacattccccacttcccacattgctctctggacttctcaaagacgtttgatcctgaaaaacatatcggatctcggtttggaaaagctgaaactaatcaattgcctttttgaaggggtagagagtgataagaagagcgaaggaatgccaggcctgacagattctaaacctccaagatgcttggatgggctgaaagatgagcgggtgatcccttactcatggggccaggacccagcactctgaaatccccgagcccatgcggaagggcttttaccaagatacatgatcagtttgattgaaaaggatttttaaaaatgacttgtaaacagaggaagcattttttttatgcaagaagaaagcttgtaaacaaaattaaaacgaattagcagttcgccagatgtggaagagagtccaattactttctccatgttgaataggaatgttcttagaggttactgtgaatgctaacatgtggctcaggccagggtcttggcatacaataaggttttaaatatttgttacccatatattaagacgatatattcaatgaactgtgctgtggctcttcttttagatgcaacactatccctaaatctctgttaaattgacattatatctggcttatgttattatatagccacccatatagctctctactttaaacaaaatttaaaagtcagggtattttcttccacaatattaaatccaattttactgtgagggtttatcttattcctttttgggcttcctacaggcataatcagaaatgaaatatagtcagtgatcatattagctttaaggattgacaatttttaaaatttccagaccagataaacaggctctttctctctatagcatttaatctcaatacccatccagtcattcctagccttgatttattgttacctttgggtgcatatcatattatttggttgtagctcacagaggtcctggtcactgaggagcatcagatcctgcctctctaggttttcccgtccttgtagaaatactcggtcaaaccccaacacccagatttggctgtgcgaagctctcctttgggactgctatgcctccattttctaaacatagtactggacaaaaacagcccacatttctcttcttttgttcctgaaacttaacaccaatcaaagaattgttactattattgaaagcaaacttgaagcagaaaccatcttcctaccacaaatttagcaatgacaaacaagtccttcagagaggtctgtggatgcacccctaatggagtcagcactccattcctggggaagaatcctgacatccagagcaatatttacaaagtgttcttataaatctcgtttgcacattatgatggaggaaatttctattagcttcttgctaaggttgccttttgcctcattccgccactgacttctctccctacccttcatcaacgcacaccttttgaaacttctaactttgtaacctagagactcccttcttcctcttccttctctccccgccgtactacgtgaaacttaaaacacatctcatagatcagttttccttctctgatgttaggcacagtccacgacccggattttcaaatagcccaggctggagtctgcaacatttaatccaatcagctattaaatgtcctctggctaaatcaagagtataagaaagaatccatagcgggataatgataccaagagcagtttggtggagggaaaggaggctaggagggggcagataactccagggatcctttgattggaaaaatcctgtttttagaactcctgtcagagtaacaacaaagcaaagaaacatgaaagaacaactctttgttccaggatatggttttaatgaaatactactaacacacacacacacacacacacacacacacacacacacacacccctactattaataaccgcttcagagactccgctttcctttacctattagggactaggaggctctgtaacgtgatcctctcccctctccccctttccagctgcctccttccctccccaattaagccaaagtggttgttctgatgagccccggcccgcacagaaccgcaggctgaggcttcccccggtgtactggctccctaccccagcacgagccttttctgggcagagccaggcccatgggacttggctgtgaggacctcatcttctagtttccgaaggcaggcaacccccaccttaagagcaagctcttctggtctccggctaggggccttcttaagaccctaacaaatgtggcatcaggaggatggcgtgcccaaagtatgcctgccttggcttcctactgaccctgctctgcgcttttttgttgacttaaccacccagagggattgcaactaagacagcaaacggggttgggggtagggaaggagaacgaagaagcagggggtggggaccgccagagaaaaagcaacagcatttgggaagggggggagcaaccttttaggcagcggggaccaggcattttagcagccgcatctgtcatctgtagcagtggacagataaaaccgtccctgatcaaagagattcgttcataaatcacccgtaagaaatggattgtgaggaataaaagacacgtgtcgaataatctcgaccctggagtctgctcgccgccagcgcggttcccagcgccccctctttccataaacgcgctgcgagcgagctcgtgtcccagctgggaatgtctgtgggggaaggactcttctttccgatcctctctgccccccattcctgccattccccggcctcggtttcagaagccgactgggccaatccctgttcgggatttcaggagatttcaatacaatcggttgattctgagttgaccaaggaaagagcaggagggaagttggcgtgttttctgaggcgacaaagttgctctcttgggatcgaggatatctgccctccaggtcccctcttaatgttctcgtcgccctaacgatctttcctccgagaggactcggacatttacaaagagttgctgtgcaaacgtaacgcaggcgggagagttcagcgagagctaaaattggctgggcgggagttttctgttccgggttttgcaagtttcgaaggaacagcggtttgcaatcaggtttccgtcctggagtaatatctaaggagcgactgttgttctctacacgaggacctagtggattctctttccccgccttccacctcctaagccccagactctcgcacctgcttctcctggtcgaaaaaaaaacaggcaaaggcgaaggtcccgtcccgtgtgctaaaagccccggccagctgttccgaggactccagaaaagcgtattgggtttagaagcgctgtagcctgtctccaagaaggtagttgacaatgctaagaaaaattttgagatttgtataggaaatttacagcgaaaagtgccccttaccccttactttactctcagttttggcatcctccagataagtaggattttgcatataataggtgtttatggttccaggaactgcactttgatctaggattttgggggtggagtgtctaaagggtctctagacgcttgtctgatttgaatgcttttcaggatgatttatggcaaaaggctcatttctgacacttccagatgtcaaagctcttaccttccaagaagggatgagggaaacttgcttcccatagccatgaggatgggagcccgcgcgcctaatacgcctgcctgccggtcttcctaaactgaccctgcctacgggcgtccatctggagccgctgataacctttccccgccttccagctcaggagaggggagggacttgctttttatgacggcaaagctacagagggaaactaagtcactcgcctgcaaaacgaggttttttctgtaactttattttgtgcagttaaccacctgctccctgccccgttggtggtttggctttaatgcgatttgacccccagatgtgaagctgggcagaataaaccctccgttgggtccctggtggtgtcagcctccggcctcaacctctagccgccgaggaacggatcgcaatcctggttcccgcggggcggagacccgcgcagcgttcagaagctgccggggactcagggggagggggcgatgtctttccgaaagctccctgcaggctcaggaccgcgaggtgaggccaggaaaaataaccctcgcgactcaattactgcgagctccaccgtgaagctgaaaagctgaaatgtgcgccgcggcaggggggcaggtcagacagggcggacgctcgggcgattttaggggacccatagggccagctgagctgagaacgcgctgaaggcagttgtcaacctgaagctaaaggtggggcagaccctcagtagctgccgcggacgcgtttctcaaaggaaacggggttttccagttctttctcctcctttgaaatgtaatagattgggaacggggaatggggggattttgttttcttttttctttctcaaagtgaaggcaaattaaggaaggaattggctgcggagacttggagagcagctgttaggagggtctagtccagggcattgcttatacaggaaggtgtaccccggagtgatattctggttatttgcttagaatcctataagacaggaaatctgtaatatttggggaacagtatctgactgtttcagtcttttctgatgaggttacagactcccttctcttttcaagtcctgtagatgttagtaacttgaaggtcagccgtttgccttcccagttgaaaaataagtgcgatttcccaggtgaaataaattaattaattcgagaccctttaaacaaatttattttccaatgcacaagttttcctcattctttataatgttacaaaacaaggaaccagatcagagcttattggtgtgtgtagaaccgatcctgatttgataagcttaatcatatgacaaaggtctactaattattccctcctctctctcaaaagacacccagaaaggtttttgaaagtctctgcctttttcctaaagtttgattactacttcaaaagactcaggtcacctcttgccttttctgtatgtacatcttcaagagcataaaaatattaaataaaaaaaactttcccaacttcaaacctatcaaatgtttaacagctgaaggatatcatctttaggaggcaggccaaaatgtcaataaaaaatttaattgtttctgaaacatatgtgagcacttacaagacccaaaatgtgatactaagtattgatattaagaggaaaccttacaatatactttcatatttgctggtcaagaccttatacccccaaaatgttccagaaaccacagaaatttttattcttcctgacagggtttctaaaactagcttgagcaacaggttggtggccaaaggggtcacctgtattttgtgtaaggagaaattagtgttgaacttctatatctttgtcacttgttttctgtataaaactgtgatatctgtagtagcaaataatatttcattgtggaatggggagatggtatacattggtgtggccatttttgttaacagcaaacaccgactgccttccaaaatgtttcttccaagtattcttcctgacctattgggaagtgacactggtagtgttatttccatagttggctgtgacaaacaagaatgatatgtgacctaaaatgaactccaaaatataggtagagtcttctggtagccacttcttctattcataagctacagtttcgtttttacatgtagcttccagaagacgtttgattttataaatatgccactcaaacttcaactgttgaatttcaggttagttggccggtcaggtcaggtactgctttgggaccgttcttctgataaactctgacaaccggtttgactttattgtcgttatttccgattttcactgaggttgtcttcacaaggctttcagaagttgctttggctgcctctttctccctcctaagacaagtggtttccaatgccaactttcacctgatggtgatttccataccttctttgtttggttattaataggcctccaacattggaataaaatttctatttctcctagtgtttagattcatttaatttaactatttaatttacatgaaggactcgaagcccaatatgtttgagacatttgcccaagaataatttggcctagtctagcattcttttctctacttggaaccatgatttttgtactttaagtacgatagtaaaatctaaaattggcctgggtaccagaactactcattttcttcagctgaacaaggattccccaaggctcagtatcattttcttttactgcaaagttttagataaacaaagcagataacaagaacacgactgtctcttaaataatgagactggacactactctatgtatagacttaacacctggtaagttgtaaaggccaagttataggaataagaattactatttggctattatatcattttgcttcctgactgaaaataagtgtctttatttaaattaaaaattctaatagtagtattttgaatacatgtaactttctaaatacttctgatttcattttgatttttaccatttctgatacaaagccttgcttgtggaaaaatgccctgagaccgttatttttgccttttataaggataattaccactaacaatactcatatgaattcaagactgatggaaaaggaaagataattttttttttttttttttttttttttttttttttgagacggagtctcgctctgtcgtccaggctggagtgcagtggcgcgatctcggctcactgcaagctctgcctcccgggttcacgccattctcctgcctcagcgtccctaatagctgggactacaggcgcccgccaccacacctggctaattttttgtatttttagtagagatggggtttcaccgtgttagccaggatggtcttgatctcctgacctcgtgatctgcccacctcggcctcccaaagtgctgggattacaggcgtgagccaccgtgcccggccggaaagataatttaactagcctgtgcagaactgtttgttggtcagaaaaaccaggagtgcagtttgccccatggagtgattacagatgaggcagaaccaaaggagagtgatcatgagtggtttttcctactctgtgcagatgatcccagaggtcttttcaatctgtgatctgtggtgccattcttatatctgacatgctctcctagtgggttttcatgagttattgatgtaaagaacaacctgtaaccagagtgtaggtagcacaattcataaatataacaacctacgtaaaaagtatgtggacttacacaaacgtacagccacaggtgactctcatttattcctgtaaatcatgtactcagttatctggctgtacaaatagagttaaaattgtagatcagcaagaagtaatgtcgaaatgttcattcttcctcaagcacttttcttcaagtgacaggctgcatggctggccactatgacactgccttcagttgaacaaatgaaagattattcagtcagcaaacatttcttggagttctgattacgatctaaggactatgcataagtgaccatgttatgctcatgacagtgaaggaagaagcctctaatcgcagaagcatggtctcacttgtgtatgtttagctacatgtgcactggaggtccttgcggtggctaccacaccccagttttctttgatattttgaggtggtgcagaaaattagagaccccttacctgtgggagaataggagtggagagggaaaataagttcctctgcattaagcattctgagagtataaactttagaacagaactaatggaagtgagcccaagaactttctcttttgcatttgctattttatcttttcatcaatctgtaggaaaaattaagtgattagtagtcacttattagactatatgtttttggtatacagatgcctgtccagcttagtgatgtgtaattctaacactttgctttgtgcctggcacatgacatttttgttaatttgaactaaatatactaattatcaacattataccaataggaaaacctgggcagaaatgactgaaaaatgacaatactgacagtcccattctatcatgggcaggggggcggggtaggaggattaatactcttatctttcatttttagaataaaagcccaggtaagcaaaaagatgttcaaaaacatttattgaaacattatgattcagacacttattttaaatgttttaaatttaaaatagctgtggagcccatagttgctatttgcttatatgagctccctgtctaaatagtaaagggagccctttttttcagggcttatatcttattgtgcagagtgggacttatttcaggcccctttgcactgtggaccaagtgcccttgttcagtgaccatccctcacaaccatatgtggcagccatagtattctgaaagtaataagtattaagtctaataagaaatttggctagcatattagtgtgttgtaatgtctgtgaaatcaactccatttgtttcgtgtgagagctccacatatactgtccacatgtgattcttgtccaaactggagcagcctgtccagaagggtctgtcttttctcctgattcggccaattagggctctattttcatatattcctgtgcaataaacagctccacattgttctttcaccttctaaaacagcataatcactgatgattaaacagtacatgccaatcagtatctgctgagaaactgaaacttcaagttacttttttactgcacatatccacacattattccaaacccaagagtggtggtttagagactcaaatgtaattgattgtgaattgaaaagaggcattctaaaaagattttaccatttgtgtgattagtatgaatggagaaagttgcttctccacccccattcttctcctgccttccccttcactccagggatgcggtgaacttgtgtaatttaaggcaggtggtccacatagtaggctgaccacagaggatgaaagagtgtgcatttgataccctgactgctgctctttaatagactttaaatatactctgactattatttggctttggctattacatttattttcactttctttcaaaggcttttctctttcatttcatcatttttccacatactgaaatgtaaccctggtccaatggcaccaaatggaggatttatctatattgtcgtcaaactaaatgcaaacgaaaaatcaaaggagagcagagggcaccactgtattggtctcttgaatgctgaaagaaaatgtgtgcatttttctctgcctaggtagtagcaacactttatttttacataaagcctttcatctgagaatctcaaaggccttcaagatgtcatttgggtctggcattcttcaattggctgccttttgtctctttcagtaaggaaatattgctgttggatgtagttttataactgagcttgcacttgggtctgcacattcaaaggtccaagggcattgggtgtttctttttttttttttttttttttgagacggagtctcgctctgtcgcccaggctggagtgcagtggcgcgatctcggctcactgcaagctccgcctcccaggttcacgccattctcctgcctcagcctcccgaatagctgggactacaggctcccgccaacacgcccggctaattttttgtatttttagtagagacggggtttcaccgtgttagccaggatggtctcgatctcctgacctcgtgatccgcccgcctcggcctcccaaagtgctgggattacaggcgtgagccaccgcgcccggccgggtgtttcttgaatggatcaaataaatgaccagttacgacatactcaaaacaaccccaagaggaagatgagtggcaaaggtgattactgaatttgcaggtggagcagttgtgacacagcagggttaagtgactcacctgagggcacacagtggagtctttgttactgctggaaacagaagcccatgtaccattcacatggctgtgcttctgtgacataaaacacttatctgctccttctttcaaaaggaaaatctggaagaaaaggcactcttatgcatataagaaaaagattccaatgcaagggagaaaagagtaataactttggaaatgtcaaagataaagaaacctgtggaccttgcttttccagaaaagcacacagcttctagtgaaattattgcatataaatataaaaagaatattgcttgcacatagaaagtggcagtgtgatttttaaagtttacttccttataagtacaaaagcatgtgttgatctcagctaggaagcaaaggcataatgctatatgttatatacatatacacacatacatacatgtgtataactatacatacacatttatagctggatatatatgtatacttttaagccacttgcacattttcaaacttaaaggcatttttcttttctatcttatttatagctattttattctgtcctggaattttgttttggctcattatctacaagcataggcatctgcttcaagatcgtagttattagtctgaagagcttcgaattaaatgtagattatgcctccttggcatcattatacaatttactattaactctgtgtgacagttttgactgtgttattccacttaacatttatgttttaatatcctcttgagacaccatttcacaatttacatttacttttaaagcccattgtcaagtttgggcaggaatctcaactctgctttcagatgtaaaacaacttgagtattttattccaacgagggagcagatagaagtactatgtatataattttagcagagaggatgtcataaaaaagaagactatagtttgtattcgagaataattatacatttgaaacaaaacaatttattaaataaaagtttattttagtttccctttcttttactttatattcaaggtgagtttttaaattgcaacctgtctttcatagtgaaagattcttacacaaagccagaaacgttctggaatcattctaatatcatacatactaaagctgaccttagtccatcttacttgtaattgtttacgtaaaaaaaaaaaaaaaaaaatcctagatctatgtcctctaattttctaagcttagaaattctcagatccaagctatgtaatttagaaagtttagaaaaagctgttccatatataacattggttttaccatatcggggtagaaatcttgacgtgatatgcccatttctttatctgtgcataccatctaggttctcagcttagttttgatctgctccagaagaaatatgcacaaacaagcaggagtaatgattttttaaaaaagttaaaaacttatttatgttatttcacctgaatttgagagtctagaatctgcactacattttgtcattattagtctctcttgtccatgaaatctctgctgctttgtgctgtctttggcgaagtttgagagaggtaaaagtttagcaacataaaacaatgttttaagaatgtttctgcttcatgattgctttatgagcaatatgcattttgctcttctttttcttatatacagtaatcagaccattaatattgcccttctccttggcatatgtgtctttattttgaggttatgaggtttctttttcttatatacagtaatcaaaccattaatgttgcccttctcattggcatatgtatctttattttgaggttatgaggtcttcttgcattgttaattttgccctaaatgaaagtactctttctgatgtgtagttggattagcttggggtataaatggaaaaagaaagagtctaagctctgccaattattagctgtgttcctcagccacttaaatgaatttatctgagcatctaggtgtctatagttgtatagcaaaatggatgtatccccagcactatcattctggtaattgaatatgtcagacaatgcctcagtaaaatacaattttcaattactgctctaaatcatttatgctgtagtgttccattatttgaatgataagcttgtgggagttatttgtatcctactgctcaaggtcatcgccaaggtctgatttttcacaaaaaatttgcaacctccatcataaatgggttaagttgtcaagaaatgttttctgtcagatgcaaaattttaaatctatagaatcttttaaaatgttatgtttttaaaaatcataactaaagcctgcaaagtgaagcattattttaaaaattcaaaaattatttttgaatctcaaattactatagtgcaaaaacaaaaagaaaaacttgagatccaagagcaaaaacaaaaacagtgatcaactaataacatgttcttgctatcagaagtcatttgctaatagttttacttcactattttcttgttaaagaaagtgtttgttagtaattcactgaatcaaaaattaagagtctaccataagtcattcataaggtatctttactagtcaatattagtcttattcaacagctcgtagctatgttatatgcctatgagagacaatgagtgtgtatgcttatgtaatgattagcactcttgctactgatgatggaaataatagatacaggaacgaatattggcaagaagtctttaaaatatcagttcaaaattctgcatcaaaattttctttttcacctatgatcttaaagtaaggtttagaatttgaaacttttcttaggatctacgctctggagtatttctgtttcttgttttgttttgtggtcactaaccacagagaaatttgtcttttttacatacgctggaaataatttactgcttttagaaatattaaaccacagtaaaaagccaatactaaagaaacattatgggtctgccgaatccctcaaaaagccaggaaattgagagttaatgcagaagctctgatctggctctgtgtcctaggggctttagaactctgaagtatgacaggtagtacccagcccacatatgtgcaaaaattaagacaaaaacaaaaactatttcggcaggatgtgtggtagagggcatgcgtagttagtgcaaattatctgagacactaacatttacacttacttgatataaaataatgcttttcataaacaccaattcttgtctaacacttagataaaaattataaattcaaaggcttccaatgtgacaatgtagattgtgatctgtggtatagatatacttaatggtgtagacttaacaaatatgaaattctcaaagttttaggagtaatattcacttgtattatctctgcatgtggtttacagtagaagcgatgcttctaatctattctgctaatctcacttaagaaaccagaaattcaggctgttcccacagattcggtcttgaaaataaagtctcatttatgtacacggcacaaaagcaaaagttcaatgtttgtagactacgctttttaagtgttattttccaaacattattttacatatatatatatatacaaattgaaatttataaattactcaataaagcaaatttcaattgacaaaaacatttaatctgattagctattatattgtattgaatttatttaaattacataacacttttcctcaagaccttatagttacctgttttcattttaatatttaattattacataatacacaaatgatacttgggatttttaataacaaggtttatatcgaaagtggttttatttttaaagaaattattcaacacataatttattataataaagcttagtttatatcaaaatattttcttgaattgagcacaatgctttaaatgttttaaatctataaaaatagaaagactgacaatccttaagttacagatatactcctgataatattattcaaagtgcattgtctcataatggataggatatagtatactttaaacatatttcccttgagctgaagttttgtccgaataattaaacaatgataattaatctatgaataatgtattgcttcacttacagccatattatttgctttctttgtaaatgaaagagaaaggtagtaatatacaaatgtgtgagttatttaaagtaagcatgtttggaatcagaaagctgaagatgaattggcataaagcagagagcatagactgcttctaattttaaaggaaaaagtattttttgttgtttttgacatagactttacctccccaaaagcaatttttgtttttaaaaaaagctctgttttgaaagaaattttatcctaaaaattaggcatgatagatgatgtatttaagaaacagttattattcaacatagaattaaattggttgaaaactgataatttgcctgtttgtgctagtgatttcagtaaatactggtacaataacaagtatatagtgagaaatatttaacaacccattaagctaggagttaaaatatttttatagtttggaaaggattaattgctgcattccagaaatactttctatacttactgaatttttatatattagtttagatctaaattattgttttctacacttcaacatagaaacgtttaaaacgtattgttgaatgaaggttatacaatgaagtatttccagattcaggaatacaattataatttttcacattacatattacaaattagagattttattgggttgcagttttgtgtcaataaatgaatttattaatcctactatttaacatattttccccataaacatgggaagcacattaccagggagaaaaatgagtacgtgaacaaaaattgtcattaacacacttctgaaaattaaactttgtaagtttaaaaatcacagcttcacaaataagagacagtttgcctttctactctgggctgaaagaaggatatttgacacatttacatagcaaacttagtcaatgtttggaaatcctttgtagtggccaaaagctatgcatttccttctgttgacctgatttttttcccttccaataaagtaaattaatagaagatgcatcaaacaggattattgcagatgtgcacatactgcagtactaattgctcttttatttttacaatccaatcctgcacgtgctttaatttatatttgcctgagttagttttttagtgaattagcagtatctgccacacactgaatagtaatgtgcttgcatcacgcgattatctcagatacattattgtctagaatccatgatcctaatttccttaccacccacgcccatccctttactctgtttggaaggctgatttgtgttaagagggaccaccaagctattaaccctaggacacaactagcattgtgcatagagagtagggcgtatgatcatatcccattttaactcttccaccagcattatccttgtttcccccaatgctttcacgaggtaataactccaaatgccttgcatggaaatgataaactgcctgttgtgccttttctttgaaggagttctcctgcagagtatcatatttaaataaattgccattgagtttagcaagcagcacaatcatgcccattgaggtagattcttttgatcatattttgtaatgcaatcaaggatcacatgaggatgctcaaacgggccagccttgctgtgtgctaaatagggaacaggagaaagagaacattaattgccctgaatcccaaggacataacaaagcacacctgtgttccatgtcccacagaccctaaggcagtgggtacataggcaaccaaagtaattcttttcacgtgattgattagtaattttaataaaactattagattttttaaaagaaatagctgatatcttcagattttcaaaaaatctcaaatgtgagcacataagcacagcatttttgtacttttatgtaagggaatgtactggatggcatccagagacctaggcttctggtctgcctattggttgagctggttaatgtccctgccactgatctccccttccttcacaccctatgtacaagaacaataactgcccacttactggcacagttcttttgagtattgcaggagaccatgattaagaagaattttagtaataaagtaccttacaaatgtatttttctaatagctgtgtggatatatgtgtggcacagactatatatgaagtgttccattcccattaactctttgcaaacatttttgcagtgtgaatctttctgaaaaaatgaagggcttggggcctttcatctaccaaaaatatcagtctactagcaaggaattgcctactgaaaaattaattgaggaaatctggggacactattgaacttcagcagatggacttaaaaagaggcagcagatgtggaagtgggggcttgtaaagaatttcctgctttactggtccagcattccaactttctgttaaactctgaaatgtgaatgagaaagaactaacccataccatcccaaatcatttcctgccgacagctactgtttagtaacctgttaccctgtccaccccctgcctttgatggtgcaagaaagataagtgagagagaaaaactaaaaattgagaaagtaagaaacagtttttttctatccctaccaagatcattttagtggaaatgtaatttgtttttcagaatggttcaacttagaatagagaattgtatagtggaaagaatattgctctttcataaagaagaaatgtggaggtccagtcatagtctaataccttacctttgtgccaaaacggaagcagccaaaaatattaggggtgggaaaggcacacctttgttcctagagggtggtgactgaggttctttcataaatgttaaacaatgtttataattctatattcttattatgagctaaagtcaaataacctgaaaaataaattactgggaagacaaacgggctgaatggcttttatatgactttggagtctgaattaattacctagagctgctataacagaggaccacaaactgcatggcttaaacaacaataatttatctcacaattctggaggctggaaatttgtgagcatggtgtctgcagggttggtttcttctgaagactctccttggcttgcagaatttcacctccccgtgtcttcacatggccttccctctgtgtcggcctcctaatctccttttcttatgaggacaccagtcatattaaatgacggcctgccctaatgacctcatttaactgtatttacctttttaaagattctatctccaaatatagtcacattgtgaggtactactggggatgaagagtttcacatatgcatttttagggaacacaattggccccacaacagagtcctttttttctgtccaagcagtattgaaaagatgctgcctcaagtaccctaggggtaaaatttcttccctcaattcctactgatattatagaaaacttacaatgtattttacggtcctgacaattacaggtgggattcataggagatatattgacgtgacttttggattctaaacagtgctgagataattaagcagaatctgaattaagattggaagtggccacccaggatatgataacagttaaataatctagaaactacttttttaattgcgttaggagagagcaagtattctcatggctgttctttctcacatagattcacataaaccatccacaacccatccataaacctgccttatgtttccccatagcctttgtttctcacctttccaaccaagtagctctggccctctcactcccaccttatcctataaatgtaaactttatagggacagggcattgtgtttttcagtcacctctgtaatgtcaatgttaagcatgcagtgaaagctacatacatatttgataaataagtattaaggttgttgttttatataagaggctaaagtttggacaccaaattcctctttatttcatcttgtactttgccgatcacaggagcaataagaatatcagggtttcttacgagtccaacatgtttagtaaagctaaagcacttaaatgaagctaaagcatggaaactatggtagaagttgcagtcagatcaaagaacatcttggtagcagccatacctgcgagccaattggctcatcagattaagaatcagatgtttataatgggaattagtactagtaactaggcatatatatgcgttatctctaatccttaaagtaactcatagtgtaatatatataacctccatttcacaaataaggtagtgaagttcagagaggtttgaataacttatccaggagtccacagtcatttaactgacagacccatgagttctatttaagtctctcaggttccaaacaccatgactttacctcttactcaacgttgtatctctctagtcaaaatgacccccctagtggggctggggagatctagccaattacaacctaataatatttttatatattctgcttaaaaatttttccaaatactatttttcttgttagtaaagttgaacaaactattgacttcttgttgtaaatacaacatgtgtaattaaaagctgggtggtattttccgaaaagaaaggagaatgatttgtctgtgctcgactggttttctcataacttgacttcaactaaccttattaatcaggacaatgaagaaaaattcacaaggctcatgagtcagcccattttagattctcagtgtcagcatatggtctcaaagcccaaatgcgttattttcacacggtgcatctttgactgtttattacaggggaggtagaagaagaggaaagcattcttttttgttatacatttaggaacacagttaaatgtctttatccccaaaggcaacttggcagttttgggcttggtgcccacattgttaaagctgcgtttgttctcaagcccctagaaggactttttaatattttaaatattctagtttcttcatgtcccctccctatcctccagaggaattgtttaaatcatatgattgatctatttttaagcagcaattctgtcacgactgttcagcagggagacttgttttcttttaactttatggtactttatataggacctcttagtcatgttcatagaatatcaatcaatctgtaatcccagtctcatgggtttttttaatgctttatgaattaaacattgtattgtatgcatatgactgaaaacccttcttttcaaccacaggaataataagttctaaatataaattaagtaaaaatttcccctccttatttaattctagtgatttaattttaatacgggataggaagaaatgtatttggatttcatgattcttattgtacatagaagattttaaattaaatggttggtgacttgaactaatatgcaggccatgtgttttgttcacttacccaagacccccatttactgctacacataggtgaggccattggcatccaaggtcagtgcttttgattcaaatctcccttgtgccagctcagcaatgtgatactgtgcaaggtgcccaatctctgtataccggtctcacatttgctaagtgatgttacctatccataaacgtgtgtcggttaaatgagattatctatgtaaaagatttagactagcatctggcacttcatacttcctaaaaactactcaatcttgttataattgtggtcattattatcatagaaaacatgaaaatatcaccctttgcttttgtggaaaagaagaaaagctaatttctctgaccttttctcctcctttccaattctgtgcctgttgaaaacagattttctcagctttctgtctgatgccagcatggctgcggtaaaactaagagcaccaactcactacctcaaatctgaatttgttgctagcattggggacacttaagttctttccaagctacagtgaaaagtgcaaaagagtgtgtgtgtgtctgtgtgtgtgtgtgtgtgtgtgtgtgtgtgttagagagagagagatgagggtttggaggctggactcctaaataatattatttcggtgggataaattgttttcatcttcagctcctccctttctcttggtaaatctaatttacttgcagtgactcactgcaagtgcagctggaataaggatggctcttccccagcaatgagaagggttttaaagctgtttctgtcttaaaaataataggtgggtttctattgggtcggaagaaggtgtaggcactaacaagttaatatctgatttaatattaaaatgaaatatcttggcacatttttgcaaaaattttgggattattgccactaggtatagacatggaggaatggaaaaatagaaagatgtgaaatagatcttgtatgtcactctttgcaagccatgacacttcctttggcaatagtcctgctacttgtgtgcattgaaaccaaacaatcaacaaccagaaaaacctagaaaacatagtaaacttcttagggtgaggacagttagcacataatttaatgtcttgggggcaataccatgcttgctactccaacaaatggcacatgttccgtgctgtcagccttgaggatttgaagctgccagtgtctcctaaataattgtgagtcagtgtctctgcagcacttcaattctacaattaaatatctgataaatagccatactatctcttttctcttccccactatccccctttcacagaaaatttcacttttattcttctttcacagacataacttgcataggagagctagcagaaagtcactgcatgagagtaagtcaggggaagccctcgccaggactgttcttcctgcctcttcttggcagtacccgcacagcacccctcctcatttccactaatgtgtcagccacaggaataagaacttctgcaaagcacgttttaggctttgctatgtattaatttatatacagctatgtattaatttatatatgtctaaaaactctgggcttttgaatttgctatcttgctcatcagtgtcacatgaaatctactttatcattcaaattagaggaaataatatgttctgcatttttacaaaatgtaagactccctcacagttcctgagatctgagtttggaactggaaatggaccttcccagagctaagttaagtctaatgttgtcaagcacagcatcacggttcagagggaaaagagaaaagcatctaaccaaggttcactaagtaaaaaatttatcagttcccttagtcagcaaatgctgcctcagaagccacgctaatgaattgcatgttaatgaatcagaaacagaggtgtaattaacacaagacttcaaagggaaaaaaatacttggtcatatgctttttcaaattttgtaaatattgttcagttctacaactgatatgttaaaaagcagattttttacagcttactcaggcatagtacacatagcatacagttcacccatttaaagcatacaaaccaatgatttttaatatatttacagtgcaaaaaccaatacagtacattttataacatttttgttatttcaaaaataaactgatactacttaactgtcacctttctatgctcctatccccaactcttcctaaacaatcactaatctactttttatctttgttgatctgcctattttggacattttatataaatggaattacacaacaggtggtcttttgtgacttttttcacttagcctagtgttttcaaggtttatcaatattgcagcacatatcagtgcttcagttctctttatgaccgtatatgagtatacattttgcttatccattcatcagctgatggaaatttgagttctttccactttttcactgttataattaatgctgctatagacattcatgtgcaagttttagtttggatgtgggttttcattccccctgagtgtatgtagccaggagtgagttgctgagccatatgatagctctatgcttaaccatttgaggaactaccagagtatcttccatagtgaatgcaccattttacattcccaccagtagtgtatgagtattccaatttttccacatcctttttaacacatgttatcatctgacttttttattctagccatcttagtgggtgagaagtggaatcttgtggtttccatttacgtttctctgatggctaatgatgtcaagcatcttttcatgtgcatctctcatggccattaatacatcttctttggagagctgcatattttaatcatatgtatctttataaattgggttatttttcttcctattgttgagttgtacgagatatgtatgttctagacaaaagtttgttactatatatatgatttgcagatgttttatcccattctgtgggttttctcttcctttcttgatattgctctttaagcacaaaagtttttgattttgataatgtccaatttatctatttttcttaattgttcatatttttgctttcatgtctaagaatttattgccaaatccaaggtcatgaagacttatacctaaggtttcttctaagggtcttatacttttgtacttatattgaggtctttgactcaatttaagttaattttgatgtatgatatgaagtatatgcctaactttattcttttgcatgtgattatcaatgtgtgccaacaccagttgtccaaataattattatttctccattgaaatgacttggaatccttgttaaaaatcagttgaccatagatatgtaagtttaggttcttaattctgttcatttgatctatatgtctacgtctatccttatatcagcatcatactgtttgatcaatgttgctttccagttaagttttggaattgggcattgtgagtctttccaatataatctttatttcaagactgttttgtctatactaatctcttgaatttccacagagattttagaatcagcttgccaatttctacaaagaagtgagctggaattccaatagggagtgcagggaaatctgtacatccttgggcagtattgtcatcttaaaaatattaggtcttccaatccatgaatacagtacatttttccatttacatagatattctttaatttatttcaactatgttttgtagttttcacagtatgtcttactcttcttttaaaatttttatttctagttatcttatgtttatgctactgtaaatcaaatattttgcttaatttcattttcatattgttcatcacaagtatacagaaagactgaatttttaatattgatcctgcaatcttacagaactcatttattagttctgctaattatttctaaagtgcatttatatttagacatttttccaagatcaaggcagaattcaaaaattaaaaataaaaattaaaataaatttaaagatatgtatagatggccaagcatggtggctcatgcctgtaatcccagtactttgggaggccgaggctggcagatcactggagcccaggagttcaagaccagcttggccaacatggtgaaacctcatctctactaaaaacacaaaaattagccaggtgtggaggtgtgcacgtgtagtgccagctacttgagaggctgaggtacaagaatcacttgaacccaggaggtggaggcgaaagttgcagtgagccaagattgtgccagtgcactctagcttgggtgacagagtgagactctgtctccaaaaaaaaaatgtatagataagctctagatgacttttctttctttatgttacttaattgctatggctagaacttccagtagaatatggaatagaagtgtgagagtggacatccttgtcttacttctgatcttaggtagaaaaacctctagtctttcaccatgaaatgttagctgtgggttttttgtagatgccctttatgaggttgagaagattaccttctattcctagttggttgagtatatttattatgaaacagtgttggagtttgtaaaatgctttttctgagtctattgagatgctaatgtggcttttgtattttattctgttgatacggtgtattaacattaattgatttccagatattataccaaccttgcattcctgagatatattccactatttcattgtgtataatcctttttccatgttgttggatttgttggattcacatggctagaattttgttgaacatttttgtatcaatttttatgagacattgatccatagttttcttttgatgtctttgtcttgttttggtatcaagataacactaaccttgtagactgagttgggaagtattctttcatctttaattttttgaaagagtttgtgaataacttgtatcctttaaatgtttggtaaaatttagctgtgaagccaatgggcctgggcttttcttgtggatacattttggattatgaattcattttctttacttcttatagtgctattcaggtggtatattcttgtgttaattctagtagtttgtgttattctaaaaatttgtcttttttatctatattatttgatatatttgtagatgattctcttatttatctattgagaaagggtcttgctgtatcaccctggctggagtgcagtggtgggctcacagcttactgcagcctaaacctcctcaggcaaggtgatcctcccatcttagccacctgagtagctgggaccacaggcacaagccaccaccccctgctaatttttttttttttttttttgggtagagacagggttttgccatgtcacctaggctggtcttgaactcctggcagtttgcccatctcagccttccaaagtgctgggattacatacaggcatgagccactgcacctggcctgtatatgattctttgtcatgttctttataattaattttctttctctaaggttagtcaatatgtcctctctttcatttctgattctattaatttaagccccatccattttttcttggtcattctagctaaagtttcatcagtttttgttgattcgttcaagaaacatttgatttcactgattcttagctcttatttttatattattgttgtcaatttctgttctaatttttattatttcctttcttccatttcaggtttacttcgctcttatttttttcagcattttaaggtacaaggttagattattcatatggtatatttctttctttatttaacataggcacatacaggtaactttcccagtaagtactgctttaattgtattttgtaaattttggtatgttgtgtttttatttgttttcattacaaagtattttctaatttcccttttgtttttttctttgactcattagttatttaggaatatattgtttaattttcacatatttgtgagttttttttaaatatctgtaattgacttcaatttaatcccattgtgattagagaacatactttatattatttctacattttcaaatttattttgaaagtgtaggtttgttttatggcctaatgtacgtctaacctgaggagtgtttcatgcaaatcggcaagaatgaatgttctgtcattgttgagtggagtggagtgtcctataaatgtctgttaagtctaatttgtttacagttttgtttaagtcttctatttccttgttgatcttctgcctagttgttctatccattattgaaagtggggtattgaagtccccaactgttattgttgttttctatttctcccttcatttctgtcaagttttccttcatgtattttggtacattcatattagttgtttataattgttatatcttcccagtgaattcacccttttgtaattataaaatttatatctttatcattaataaaacttcctgttttaaagtttatttcatctcatattagtatagccactccagctttcttgtgggtgctgtttacattatatatcttttttcatccttttactttcagtctgtttttatctttgactctaatgtgtatatactgtaaacagcatatagttgaatctatccgttttaaaaatctgtcagttggttgggatatttaatctattcacatttaatgttattgatacagttgaatttacatctgccaattaactttttgttttctgtatctgtcatgtcttttttgctcttctattcctgctttagggcatatttttcattaagtgaatatattctaatgtaatattttaatttaatactttttttcatcatatatttttagaattattttctggtgggttactctaaggcttattatatatagcttaacttctcagaatcagctttagatttatgctaacccaatccattaatacatagaaaagttactgttatacagctgtattctctttttccctctttgtgctattattattttacatattacatctataaatattgcaaactcaacaatccattattataattattattttatatgttataatttttaaatactgtgagagaagaaaggatagcaagtatgtatttacagcttttgttatttaaatcttatttattatttctggtcctctttatttgttcctgtaggttagagttattatctagagtcattccaatacatctttgtttccacccatctcctttgtgctgtcagggttaaatatattatctttctttatgttatagacccaataatacactatatatacacacacacacacatacacgcgtatatagttttatgcaaatttatttaaatcatttaaaagaactaaggagaaatatttatttatactttatttaataattacaaaattacctttactggcactgttttttcatgtggactcaaattatcacctggagtcacatcctatcagcctgaagaaacttctttagtatttctagtgaaagggagatttgctagtcaaaaattctctcaattttttttatctgtgaatatctctatttcatcatgtattttatcccactacttttcagcttcttttttttttttttttttgagatggagtctagctctgtcaccaggcttgaatacagtggcgcgatcttggctgactgcaacttccgccttccaggttcaagggattctcttgcctcagcctcccgagtagttgggactacaggtggccaccaccatgcccagttaatttttgtatttttagtagagacagtttcaccgtgttggccaggatggtctcagtctcttgaccttgtgatctaccgaccttggcctcccaaagtgctgggtctagtctattttttttttttttttttaatgagaattcagatgttaatcttactgggttttccttataagtgacatacttttttttcctcttgacgtttttaagattttctttttgtctttggcattcagcattttttcacctgtatgttgaaaagtttttttttaacatttttatgtttttctttttaataattggactcagcctaatgcaccccatgtttatccattttggggaagtaaaacaacatgtattaatgaatattctcccaaatgtttaatatggcaaagctttactcaaataataaaagcattaagttttctctgagtttttgttcttataaaacacatttgaataaaatgcataactttgtaaactcatgaggtaccttaagagtatccccagaaataggccagtgcacagtgggcaggaagccagggctgactcttgaaataaaactgacactcttgaaatcccttttagggtcccgttcttgaaaaacatcccctttatacacagttgctttgtgttctcccagcaatggtgcatcccttgggcctatgttattgtattatatttatttttcccatcccacatatttgtgagttctttggaagtgggtgctttgacaagatcagcttcacactccccaagcataatacttggcactaatccaatcccaagtaatagaccactaattccaaacgtaacatattcaggtgaattcatccctactgacataatttattgcctcagcacagtactgttgattatttatttattcctttatttatttattcacaacctgggtgcctttaagggggtcctaaacttccagttaccaccatggctctcccaaagcctttgaccttgatgttctccaactcctgctgcctggatggtccctggaagtcctggggttttttatccttttcaaaaataatttatgcaaactaaatgactgagtaaatatttaattatgtagatcaagtttcttaatcaaatattcatgaattggcttctggtagttaatttttgttcctttggcatttataaataatattattgatacacatatataaatgtattttcatggaaagaagatccacagttttatcaatgatgagtataggtagccaccgtatttcctcaattgtaatatgcaccattgatttagtaacagtcttttggaaaaattaaaaattaaatgtatgcagtgtttttcaattgattttacaattcaataacattttcttcaatagcacaatcaaatttgattatgagacttttacaaatttaaaatctagataatatttctggcaccaatacataactaactgagttgaaaaagtcaatggtaggcagaagtatttctcttatgcatggctacatttgtaactgtatagggagaaactacaattggtgtttcattggttatttttctacttagcaactggcaaagtttcttttgacagtgattacaaaatacatataatcttcataaaggttaaaattttaatatgtttttggaaatatggtgtttatgtagttgtaattgaagttctttagtcaggaaattaacccatatttataatgaaaactgtatatggtttaatatacagactcttaggaaacaaactgtaaaggttacattgctaattttgagacagttttccagtttttccttcctaaaagagactggtaattattagtttggctgagggatggcctttgctaactataactgtttattctattttgctctcctttcacaaattctgatcagtgctggaactttagcttcctaactcagggacacgattcccaagtctcaatctttcctcttgcagtttctccaagtataatctttgaatacgtattcttggctgcaatgctctaactcattgattgtgctgtgttggcaatagcatggtctatgtaatgctaagactgtgatacagtgatgatgaaaagagttttcaagggctctatagagatgagtctcttttcttactttgattatgaagtgaaatatggatcaccaattagtagagtgtgattgaatcatttgggcagaactactatggttgcctcaatactattaccattgaattgcttcatatctcaatgtgtggctttcaatagcaagaatttagttgacaagaaggacttgatctatttaaaagcatcctaataatgataggttcaaatctatagtgcacctaattacaaagatgtaagttagttcctcaaccatgttatcatttgtggataaaaatagaacagcaattgagatattagaggaagttttggtttttcttttttgtgtttgatggaatgagaatattatgcaaagtatgaggtttatcttatgcctttttcaagtagcataaaaaggtaaaacgcatcttctgttttccaatttcatgtgctttttctcttaactaactgtgcaatttatgatgccttccatgtatgactgttttgattcctcatctttgatattctagagtcaagagtaattactagcacatggtagatgcttagaaattgcatgttgaatattatgagcacttagatattgattcttaaatatgtagtttttttttccctcaagaggttttgtgaacttccaaattttatactgagtgactttatttgagaaagtgtgctagtatgtatttatttcacagtttccagtaatctcgattatcataaagaagtcaagtgaaccttcacaaaattagttctgtttatatttggtgtccacgtatattaagaaattcaaatgtacagaactatcttctcaggcttctctttaggagaaaatgatgttataggtgaatttcaaggtaagaatgttgccagaaagtggtcccaattcagacccaaagagaggaaggtaagaatgttgccagaaagtggtcccaattcagacccaaagagagggttcttggatctcacacaagaaagaatttggggattctttccccaagtccacggaacaaagtgaaaggaagtttattaagcaagtgaaagatgcctactccataggcagagcagcagcgtgggctgcttgattgagtatacttatggttatttcttggctatatgctaaacaaggggtgaattattcatgagttttctgggacagggatggggagttcctggaactgagaattcttccccgttttagactatatagggtaacttccagacattgccatggcatttgcaaactgtgctgatgctggtgaaagtctcttttactatgttaatgcattataattagcatataatgaggtcacttttgttgccatattggttttggctggcttctttattgtaccatgtttatcagcagggcctttgtgacctgtatcttgtgacctcctatctcatcttgtgactatgaatgcctaacctcctgggaatgcagcccagcaggtctcagcctcattttacccagcccctattcagttgtgatttggagtagctctggtttgaatgcctctgacaggaaaaatgatcaaactaggaatgtttcatggggttctatacttagatcagataatcagacagaaaggttaataactaaggttaggaaaatgtggtgttgatgatgatgtgtgcagatagcaagtggtgaagtccacaacggggaaaattgataacaggagagatgggagcttatgaacagacggaagcaactggttgaatacagaggtcgaaaagaggcatgaatttaggatataggtttaattagtacttagcatgtgttttgaagacatggatgggagcccacagaaaccgtttttattatagatatcacaaaattttgcttttaatattttgggtatttaatgaaattgtcttattttatagtcttttctcttgaaagaaggaggagaatcaacctttagatactccttctagatgtgtttataccatatttaactaattagtgaactgaacaatctagtggtatatatttttatgcccattttacagataaggaaaaggaaattcaataaatttaaatccatctagttaggcagtagtagaggtgggatttataccactctgttacagtacaggtgacaaaaatagaaaattcaaagacttcagcttctaccatgaaaaagtaatcagttccagttttgccttactgctataaacaactagagaacaggacgaaaatatatgaagcaatcatttttacaaattggacagtaggcagtacaggactgtgatctttgagagaagagaaataaacaaagtgagctttatgattgcatcatctttctgcctaaaggaattttcccgaccataagacagggatgggacccaatgaaagcacgatggtcttgctgggtaaaaaaagagattattgttctgggaggcaaagccaactgaactcacaaaatccctcagaggagaaaggtgactagaaaaggagcattcgagtttgcatagaggtgacctgagtctgtgactgattactaaactatgcatttataggctggaacatgaggtcagtctcagaactactagggagctgtaagttgaaaaattcttagagctcacctgcaaatggcagatatttgtgttccaactagtcagagggaagaattgttgaacatctggggcattcaatattaagtaataaaatacaatgtgttaatagtaaaactaagctaaatgtagaataaaggatactctagacctgctctaatatgatttatttgtattggtacatactatttatgcatatttaaggggtatatgtgatattttgttgcatgcagatatgtgtgatgatgaagtcagggtatttagaatatccatcaccattagcatgtatcatttctgtgttgaaaacatttcaagtccttacttctagctattttgaagtgaacaatacattgttgttaactataatcgcttgctatagtatcaaaccttagaacttattccttctagctaacggtaattttgtacccattaaccaacctctcttcattccccctctccctacacacccacagcctctgataactattattctaccctctacctccatgagatcaactgttttagcttccacatatttgcctttctgtgtctaatttcacttagcacattgacctccaattccatcccatgctgctacaaatgacagaattttattcttttttaatagccaaataatattccattgcataaatataccacattgtctttatccaatcacctatttatgaatacttgggttgattttgtatcttggctattgtgaacagtgctgcaataaacatggagctgtttgtatcccttagatatactaatttcctttccttggataaatacccagtagtaggatggctggattgtatggtagttctgattttagttttatgagaagtcttcatattgttttccataatggctatactaatttacatttccactaatggcgtatgagagttttttttcctctgcatccttgccagcatttgttatttttttagtaatagccattttaactggggtaagacaatatttcattgtgatttgatttgtatttccttggtgattcttttgaatgctcaatacactgtcagccacgtgttttgttttttttgttttgttttgtttttgagagatgtctatttagatcctttgcccactttttaatgggattgtttggtgttttttgttagtttgttttatatgctgttgaattgagtttttgtatattctagatattactcccttgtcagatgactattttgcaagtattttctctattccattggttgtctttttattcttgattagttcttttgctgtgcagaagctttttagtttaatataatcccatttgtctatttttggttttgttgcctgtgcttctacggtgttagccataaaatattttcctagaccaatggcctggcatgcttcccctttattttcttccaatagttttatattttcaggccttatgtttaagtatttaatccaatttgagttgatttatgtatatggtgagagataggtgtttagtttcattcttctgcatatgggtatctaattttcccagcaccgtttactgaagagggtatcttttccctagtgtatattcttggctcctttatcaaaagtcatatggctgtaaatacatgagtttctttctgggtctctattcttttccattgacctatgtgtctgttttggcacaaatattgtgatgttttgttgactctaacattgtaatatatgttaaagtccggtagtgtggtgcttttgtctttgttcattttgttcaggatcactttggccatttagactcttctctggttccatacatattttaggattgttttttctctttctgtgaaaagtactattggtattttgatagagctggcaatgaatctgtagattgctttgggtattattatcattttaacaatattagtttttgcaatccaagagcataggatgtcttttcatttgtttatgttctctccagtttctttcatcagtgttttgtaatttttttttctgaaggttttcatgtacgtggttaaacttattcctagttttttttttctgctagcaattgtaaatgggattgctttcttgatttctttttcagctagttcattattagtgtttataaacattactgatatttgcatgttgattttgtatcctataactactgagttatctgtctgatttttgatggagtcttgaggtttttctcaatatacaataaggttatctgaaaagaggatctatgtgatttcctcttttctaatttgagtgccttttatttttttctgttacctgagtactgtggctaggactttcagtacaaggttgaatagaagtggtgaaagtgggcatccttgtctaattctacttcttagagtaaaagctttcagattttccccattcgttatgatgttagctatgggtttgacacatacggcctttttttaggttgaggtatgtttcttctctggctagtttgttgagcatttttatcatgaaggaatgttgaattttatcaaatgctttttctgtatctattgagacaatcatatggtttttgtccttcattctattgatatgatgtatcacattaattgatttgcacatgttgagccatccttgcatccctgagataaatctcacttgatcatggtgttctgggtttttctgatttgtattgaatttggcttgctagtacttactgaggatttttacgtatgtgttcatcagggatattggcctgtagttttttttgttgttgtgaccttgcctggttttggtttcaaagtaataccagttttgtaggatgagttaggaagaattccattctcttcaattttttggaatactttaagaaaaattggtgttagttcttctttataagtttggtaaaacttggacttttcttttttggtagactttttctactatttcaatattattactcattattggcctgtacaggttttctgtttctttatggttcaatatggtaggatgtatgtgtccaggaatttattcattttctctaggttttccagcttattagcatatagttgttcacagtagtctctgatgattttttgtatttctgtggtgtcagttgtaatgtctcctttttcttttctgatttcatctgagtgttctctttttgtcttggttagtctagctagcagtttgtcaattttatttatcttttcaaaaaatcaactttttgttttgtcgatcctttgtatttgtttttggtctttgtttggttttgctctgatctttattatttcttttaataattttgggttttgtttcctcttgctttcctatttccttgaggtgcatctttaggttatttatttgaagtctttctacttttttgttataggtgtttattgttgtaaacctccctcttagcactgcttttgctgtattccacaggttttggtatgctatgtttcctttttcatttgtttcaaagacatttttttttcattcttaatttcctcactgactcaatggtcattcaagagcatattgtttaatttccatatatttgtacagtttccagtgttttattgttattgatttctggttttattctattgtggtctggaaagatactagatatgattttgatttttaaaaatttgttgagacttgttttgtggcctaatatatcatttatcctagagaatattccatgtgctgatgagaaaaatatgtattctgaagttgttgtataaaacgttctgaaaatgtctattaggcccactggtctaaactgcaaattaaattcagtctttctttgctcattttcatatagatagcctaactattgctgagagtggggtgtcaaaattctcaactatcaccgtattgggtttatatctccctttacacctaataatgtctgctttatatatctgggtgttctgatgctgggtgcatatatgtttagaattgttatatccttttgttgaattgatgcctttatcattatataatgacctgtttggtctctttttactatttttgacttaaagttactttttgaagatataagtatagctactcctgtgagctttatttccatttgcatgtattttttttttttattcctttactttcctcctatatgtgtctttgcaggtgaagtgagtttcttcttgggggcatacaatagggccatgttttcttattcatttagacagtttatatcttttaggtgaaaaatttaatctgttgacattcaagctcattatttatatgagaggacttattcctgccattttattaattgttttctggtgttttttttttgtatatttcattttcttttctttctgtcttattgtttgatttctttttttttttttttttttgtagtggggacatttgtgtcctttcttgttctcatttgtgtgtttactctaccagttagtttcatactttcacacattttcatgatggcagatatagtcctttcacttccaggtgtagaattcccttaagcatttcatgtaggtctagtttagtggtgatgaatttcttctgtttttacttacctgagaaagtttttattcctccatctttatgaagtataactttgctgagtatagtattctggaatgacagttgtttccttttagcactttgaatatatcatcatattatctcctggcctgtaaggtttctcctgagaaattcacttttactctaatgggagtttctttatatgtgactaggtatttatctcttactttttttttttttaagaaatttctcttggtctttgacttttgacagttaaactgtaatgtgcctaggagaagacctttctgggttgtatccctttgggtttatctgagcttctcatatctgaatgtttaaacctcttgctagatttgggaagtttttgggtattattttgttaaataggttttctctgccagtacatttctcttcaccttctggttagtgggttcaagcaagcctattcttggggctccagatggcttatgtgggtgcctgtagtgacagtggtgggtcaggcatgagggtgagttcttgagcccctgagcagcatgtatgttatgggtgatcgtagtagcggtggctggacgttccttgggcttccaggcggtacttgctcatgttagtggtggcagtgtgacacaagtgggccagtccccaggcctccatgtagcatgcgtatatggatatcagcagtgttggttgtggcatgctgctcaggttgatcctcagacccccaggagaactgcccatattccagtggtggtggatggggcagagtaatctccaggcctccagatggcatgcttggacaacagcagcaggttttctggacctgttgttaggccttctggtggtgcgcatgtgccactggggtgactgatgaggtgggcaatccccaggcctccagatagtgagcccaagaactaggagagggtggtcccaggtaggcaagaacctattctcaggttcccccaatggtgtatataggcatctctgttaggcagggcagagcaagctccagacacattaggtgccagctgtggcaggcattctgaggctgtaattagaatgcataaatagaagatgagaaaaatggataaatcgaagatgagaaaaatggataaatcaaagatgagaaaaatagaaaaaatgagacaaactccatcatgtcagtgcttgcattaattaaatataatctaaacgttctagttaagaggcagagattatggaatattttatatatacaggcccaaatatatgcaatctattaaaagattttacaatatatgaaatcataatatataaatatatgttttattgtatatacatcgtacaaatgttaaaagtaaaaggatgggaaagatataccatgcaaacatgttatatgataactctgaaatgattatattaatatcttacaaagtagacttaacaagaaatatcggggataaatagagattatttaataataataaaaagccaatccatcaagaagacataaaaatttaaaatatgtttgcacccagtaacacagcttcaacatggctgcttcaagtattgacagaactgaaaagaggaataaacagttccacaattatagttaagattccagtaactgatagaaaatgtacccagcaaatcagtaaggatacaaaagacttgaaaatagtatcaactaacttgaactaattggtgattataacatatagtaagcagaatatatacattctttacaagagcacatggaacattcacaaatatatacataactcttggccatagtctcaaaaatgtaaaagaattgaaattatacagattatctgtgcttaactctgatcacaatgaaattaaattgaaaatggatagccaatagttactgtataaatattcaaatatttaaaaattaaataaccctcttctaaataaccacagttaaagaagtcacaaattagaaaatattacaaattaaatagacatgaaaacacaacatattaaaatttgtgagatgtcactaaagcattgcttacagggaaacttaagatttaaatgcttattttagtaaagaaacaagttctaaaatacatgatcaaggcttcttctaaacaaaatagataaagaaaagtaaactaaacccaaattaagtagaagaaagaaaatagaaataagacaaatattaacaatataaacatcaatgaactaaaaggcatatgatgtttctaatttctagcatttcttgttctttcttagagtttccttctctttagtggcattacccataagtcattgaatgctatctaatttcccattagagaccttacgtattagagttatttttaaacctcgattaatacaaaatctgtgccatatctgggttgcattctgatgcttgctttgtttcttcatactgtggatttttagctttttagtctttagttgtttaacatgctttgtaattacatttgttaaaagccggacatgttgtatctaataataggcctttaatgtagagttttatgttaactgtagatgtagatgacagagcattcgaattcctctagtgtcttccctgttgactttggacttccctgaggactcctccccacagagagcctgtgccttgcagcttgttcatccatagcagactatctggaaaacagagccctcttgtgtggtggtaaagtctagtgggaagaggggaagtcttacgattaaatattaatcatttagtgtgtctgtgttccggagctatgacttcacaagtgtttcttagctattttcccccatccccttaggtgaaacaggaagtctaaaggggcctagggtgggagaaatgtcattcactcagtgggataatgctctggtaaagtctttcatgttaaaagtaaaaggatgggaaagctataccatgcaaacatgttacatgataactctgaaatgattatattaatatcttacaaagtagacttaataacaagaaatattggggataaatagggattatttcataataataaaaaagccaatccatcaagaaggcataaaaatttaaaatatgtttgcacccagtaacagcttcaacatggctgcttcaagtattgacaaaactgaaaagaggagtaaacaaatccatgattatagttaagattccagtaattgatagaaaggagtggggagacaattgatagaagagagtagggagagtaggcctttgttatggagaacattctaagtgcatttcaaaatgataactcttcctttaccctgccagagccacaagggtacctttctctactcttcaccataagaatttgatggggttcctggggacaaacatacagaaatgcagagaccctctaagactgcagcccctaatggattcctactctcacattagtccaaattcagcctccaacaatttatcaaaattgtaatttaatttttcctacccatttatggctccaacggctttggcttccaatgcatagatctcagcagtgaacttctaaattctcttgtctccagattcattgtgctcatttgctcttagaacttacctttccagtgggcccaaaaaagtcattgacttttgtttcattcagtttattgtttcttgttttaaggatgaaaataacgacatccaatctctttgcatattggagataaattcagagtcccatccattgagtttttaaatttcagttattataatctttagttctaagacatctctttggttccttttcatatcttctatttcttctttgagacttcctaaattgcatttgttccaagtgtatttgtaattgctcatagaagtatttttatgatggcagctataaaattctggtcagataattccaacaactatcatcttgttgttgacatctcctgattgtcttttctcatcagtttgagctgtcccggattcttttcatgacaagtgagtttttcattgatacctggatattttgtgtattatgttacagaattttggatcttatctaatcttccatttcaacaagcttcttctgaccccactccattgagtgcaggaaggtgccacatcattactgccaaattacagtgaaagtccaggtttttcacttggcctccactgacattaggggtcaggagtaggggacccccataggtctttgctgacactactctggccacttcttgggtcctgatgttagtagcttgcctatcttctttctatcttttatgtttgttttttatatgacatacaggcttttaaatgtattttatttttcccaaaaatcaatgatgctacacacacaaagaaggcataaaaagattattactcatgtaatgaaactttttgaggagagctgtggacaagggcttgagaaaacaagggaagaagatgggctttcagctttatggcagttgggagtggggctgagggaagagttcctgtctgtgagcccaggcttacacagtttgaaattcccactggcaccaaaggagggagcacctaagctttcttatcagcatccctatataatggagcaagaggggtaggaggaggagtgaaacttaaaaaatgtcaaaaattaaacattaaagtggagtccagactctttattacacaacccaaatatccatcacggtgactatataaagcaattgtgacatatgtatacaatggagtagtgttcaaaaataaaaattaatggactgctcacatacggaaaaacatgggtaaatctcaacaagattttttgacaaaagaagtaagacagaaaagaaaacatcctatgtgatactatttgcatgaaattctagaacgggtaaaactaatccaaattgacaaaagaattgtgcctttgtttacttgggcttggggaaggggttattgacttcaaagggacaagaaggaacttttttggatgatggaaatattctatatcttgattgtaatgttgatcatatgtttgaatatgtttcccaaaacatgtggaacctgacacttgacatagctagaattttttatatgtaaattatacatcaataaagttgaatagaaaaagaggaaccttacaaatgaagaaataaaaatgaagtatagacatgtgaaaatgtctagccttgcaaatcatactagcaattaatttgtattttgattaaattttaaaaaatggtatagatcaaagtgattcagtataaattctgataaccacttattagctaatagattaatttgggaaaattacttgatctctttgtgtcttttttcctacctcagtaaatgggacaaatattagttaatacctcaagagttattttgagtactaaatgagtaaatataccatagtgcttagaacagggcctgggaaaaaataagccaatgttaaatattagctttactatgtttttacaagcctctagggaaatggatactttcatgcacagttgctggaaatgtatattattgcgtttttttgaggtcacttcatataaaatccctttaaaatgtgcattaatttggccaccatttccatccctgggaatgcatactacacaattaattgtgtgcaactgcaaattttcttcaaggatatataattatatcattgtttatagaaagaataaaaggaagtagcacaaatatccacatttccaaatataggaaattaagttatggtgtagtcatatatgactttcttgaatttccataaaaacatgtagcaacatgcaacaacactataaatcagtgtagaaaaaatttcaggttaataattaatgataaatcaatgcaaaaacattggatacataacagcaggaaaaaagtaaaatgctaaaataacctatgtaaaaaattttagcactaaaagggagaacttatacagaaaaaaatagtcatatctagctgtgatttcctagctttatgatcatcaataattcacataactttttagagcttcagtatttctaagggttaaaatagggacaagtatacaaggatatatatatatatatatatatataaatttcttagattttgtgaatatattaattgagttgtcacatattaataaaacatgttaagtgatgaaaaattgtggttattattattcaaatcaatttaataagacacatgagtagattaacatgccatttttgggggatagtaaaactaaatattataaagatgcacagcctagcaaaaatttaagaagcatcacaaaaatccatttataactctaataagatatttactgaaatacttgctacattcatttggcaaaacaaacagtaaacatatctaagaacattaacaaaaggacaaagtgatgagtcttaaaaagtgttttaaagctacaataattaaagcaatgtggctatgaagaaatcatagtcaagtcagtaaaatgggaaattataacaaaaatatatttttatctattcatattgatttagatctatatatggatataagaattatatacagtataaaagtaaaattaaaaatcaatggtaaatagatttctcaatattttatatcagaaaagttgaataaatatttgaaaaaattaggtcttcacctcacaccataaccacaaaatacattttagattaagaaactacttaaattttagaaagaaaaaaaacagaaaatgaatatctatctgatctctaaaaactttttaatttaaataaatgcaagtaatcacaaaataaaatatcagcagatataagtacatagaagtgtctgttcctgaaacacagaaatcttaagtgaaattaagaggcaaaaaattgaaaaacatctgcaacaaataagacagtcttgatattcttaatgtacatattttttgctttaaaaatcatttttgtctgggtgtggtggctcatgcctgtaatctcagcactttggtaggccaaggtgggtggatcatttgaggtcaggagttcaagatcagcctggccaacatggtgaaacccgtctctactacaaaatacaaaaattcgctgggaggttgaggcaggagaatcgcttgaacccaggaagtgtaggttgcagtgagccaagatcacgtccctgcactccagcctgggcgacagagcgagactctgtctcaaaaaaaaaaaaaaaaaaaaaaacatttaaaattattttaaacacttttataacatttcatttttcttaaaattttaactagaagattttgtgattttataagaaaaaataattttacgaacaataaatggcaagatttattcatgaaaactgggtgattttgtggaggtgacaaaatttaaacttattcttgacttgaatggcaaaacttctaagtaaggaatcttatttaaatagagccattcatcaaaattgcttactgtgaatataagtatttttaaatgcatgtaaatagaaagaaaagggaatcaggggtagtggatgtaagcaacgggatagtagacgtaaagcaaaagtaagcaaaggcataatagatgtaagcaattaattgttgataaatacaactggtattgaaaataatctggcctcatttgtaattaaatgaaattcaaattttaaaaaattccaatcttgtatcttatattagcaaatctatcctggttcctgtatcataatgacaggtaagtcaatgatgttcactcattcccttttctgccaataatgatagttattagattctgtcctgagcaaatgcaaataaaaatgtatgtgtcaagatatttggaatagaattaattataagatatagaacgtaattatcattaatgtcttatattagaaaataaattgcagcattcatccttatgttgaaatgttgtctaccaattaaactattttttagaaagaattgttaatgataatgaaaataggagtgaaaataccaagatgtgaaattattggctatgtattcttaactatgaatcattaagtcattcacagacaaaagcctaaaaagaaatatgggtatgattatgattattatattcttcatttttttgtgttattccaaatgtattactctgcattccaatacaagttatttttatatgaattgccttatagcaatacaaaatatgctctgtataaaattcttttgctatgaccatcaaatttagagttggtatattataaaaatatttttaaacgtttgtgtaagtaaattcctttgttttgggcttgtaaaagaatgaatttcatgaatgtattaactacttggttagttgaagaattccaacaattcctcatcttacttttaaaaagtgtggtttgtacttagacatgcttatcattaaaaacaaaattcctgttttactcttatctgctaacgctggagaatacaatgtgaaggagatagaaaactctagaattaccttttcaaaatgacagaattcattgttttaaaaatgttattttataaaacacttcattgggtggatactgtttaaatgctaatatattgccaaatatcaattgttgaccttactctttttggtcattttaaaatttgtgttaattatataaaccaaaatattgaacagttttatctccgtatagtcagtcggaaggcagttttgtttagtttgtatgttgtatcatggattttcagtatgttgggacagttctctaaaatgccattatccagaatgattttaaataatattcaattttctgactgacgaaaacattcagaataaatgacagaaaggtcttaaaacatatacttttcttataaagtcttataacaccatctttaaatagcattttaaaataaaggcaatataaaaagtaattcttaaaaaaataaaataaagagttcgaaagatatcatgttagagtttcaaatggtgagtcctgtttcctttgagccactgctgctccagaagcctataaatattattgtttatacaagtggagtatccctaatccaaaactccaaaattcgaagtactcaaaaatgtgaagcttcttgagaaccaacatgatgctcaaaggaaactctcactggagcatcacaattttcagatacttggatttagggtgttcaactagtaagtataatacaaatattccaaaatttgaaaaacaacattgaaatctgaaactcttctggtcccaagcatttcagataagggatactcaacctttatgtaaaacagtattaattatgaattcacatactttttttcatatttattagggatagtggatgttttctacagacatgtcaattcatgtgctacttaaagcactctaaaggattcctatcatattccttaatattttatctacatagatctcttctctattttaggattaatttgattttagttctatgtttcacatatttacccaaacaagaaatgctccctgaggaaaaatattgccataatcttcttcctagaaagcagagaagtttccagtcaaagatacgaaactagaaattagaaacaagaaatctagaccaacaataattgtattcacttagcattcatcatttgcctgtcactatgttaactggtttatatacatttatttgtttaatcttaaaatcaattctgtggaatagaaaattgagaaaatggatgcccacagaggttatgaaactggcttaaggtaacgtggccaataaatgaaacatctgagcctggaacccaactctggcttcagagcccacactgttaatcactattctatatgattaacaaagtctgaagtcagctgcatctagaaactactcagtgccttgattattttatcagcgaagttggacctatcacaattattttttcattcagtaagtatattagcattatattctggctggtaaataggatccctatattaaaatttcagaacacacccagttcccatgctgaagagcaagtattcatcatgtagaagacatttgaaagtagcctgtttcactatctatttaatagtggaattaattgggatggttacaaagaacatacgtggcagtcacattagggaccagtagaagtcatgtgcttggtagaaagccaatgtactcagtagaatgagatggtagaaagatgatggcctgtgggatacaaatcacagctcttctttacttacattgcaagcttgtgcaaggtcctccccataacctttagttttcccatgtgcaacatgctctcataaggcctatttgggagagtttttatgaggattagtgacactagtgaaagtatccagtccagcctctaacacgcaataaattttggctattattactgtgtatactatgactaataggtacaacttagagactaaagagggtcttcttctgctctgtatgggagtactaacatcaagagaaggcatgcatcatataagataaagagatagaaatgcaaatgccgatctacttgtaaacagtgaacatacatatcttaagagcattttatcagtatggaagggtgtgttgaaattatgtaagtaaaaaatgacagcattcattttatcattcattccacgggcagttatccagagcctactctattctaggtggtagagtagagacagactcaatctatccattggtgagaatgtaaattagtacaaccactatggagaacagtttggtggtccctaaaaaacctaaaaatagagctgccatatgatccagcaaacctactgctgggtacatatctaaaagaaaggaaatcagtatattgaagagatacctgcactcctatgtttgttgcagcactgttcacaatagctaagacttggaagcaacctaaatgtccatcagtagatgaatggatacagaaaatgtggtacttatacacaatggagtactattcagccataaagaagaaaaagatcctgtaatttgcaacaacatggatggaactggaggtcattatgtttagtgaaataagccaggcacagaaagacaaacatcacatgctctcacttctttgtggaatctaagattcaagcagttgaactcatgaagatagagaatagcaggatggttaccagcagttgggaagggtagttgaggaggtggaaggaggtggggatggttagttagcacacaaaacaatagaaagaatgaataagacctggtatttgatagcataacagggggactatagtcaataataatttatttgtatattttaaaataactaaaagggtataatttggttgtttgtaacacaaagtataaatgttcgagggggtggataccccattatacatgatgtgattattacgcattgcatacctgtagcaaaatatctcatgtaccccgtaaatatatacacctattgtgtacctacaaaaattaaaaataaaaaaaattaagtatgttccatgaatggactgcccatctaaattactaatctttgatgagaaggaacttgctctagatgtaaaccaaatatgttactaaggacacagatgaattcagtaacaactttcttgatgaaggaagccatttgttgatttacactctggtgcaagcttctagtagtggatcagcactttgagtaacattagattagctgtgtgtccaagggaaagaaacagactgggatatcaattagccaatttctactataccaaatgtgtaatttagatagacctatattgttaagcaggtgtattgtgcactggttaccaacttgtctcagttcagtgagaaagaataccctcatacacaagttacatgaagcagatttattacttatagataggcagcaagggatgacagatgcccaggattcattgtgatgcagttgcccaaggctcaggaaagctgcctgggatacatggaatctctactgcatacgccccacttgcactacagttgagggacctcgaaaagcagtctgcccttaattttatatctcaaggggtcacatgatttcctgggctaaagcatttgagggacaagtattcatcatttagaagacatttgaaagtagcctgtttctctatctatttaatagtggaattaagtgggatggttacaaataacttatgtggcagtcacattagggaccagtagaagtcatgtgcttggtagaaagccaaatttctgctgggcagggcaggggagactgcaacagagcttgggctattctagccagtccctccctatcacagagtgttgcattcccagcacattctgcagaactttaaaagaaaagggtgggggatggggaattgaatcaatccaacgccacccagagaactgtcctgcatatgtgtgtgagtgatgattgtttggattttaaatatctttaaggagttatcaatattaaaatgtgagttacttaggccgggtgtggtggctcatgcctgtaatcccagcactttgggaggccgagctgggcagatcacttgaagtaaggagtttgagaccagcctggccaacatgacgaaaccctgtttctactaaaaatacaaaaattagctgggcatggaggcatgttcctccataccatgctcaggagactgagacatgagaattgcttggactgggaggcggaagttgcagtgaggtgagataaagccactgcactccagcctgggcaacagagcaagactccatctcaaaaaaacaaaaaagaaacaaaaaaagtaagttacttaaaaaaaattgcaagaaatgagtctctatagtgttcttttaaaatacgtgtatgaatatattaatacattgagaatgaataaatgataatataggttaactgtaatctacatggtaagttttgggaatcaaattgtactgtcattttaagatgtaaaaattatatagcatatactcatgtaacccaaatgagtttactcagttaactcatattatatctaaagaaatgagatttttgatagtaaaaggggctacaaaagcataacagacttgaaattaggagttttgcattctagacttagctgtgtagctaaccatctgtgtgtcattggataaggagtgagcattgttaggaaagtttgactagattaggggtgtcaaattagtcttgcttcttgcatcattgcaacacaactacagggagaaggattctgaagcagaatttaggccctttggtcaagaataccatgaacaataacaaatttctactaagggtgaaagataagaaaatagccacataagaagtaaatatttgctatatttcaactctcttatttatcaggttctttatgtctctaaaataagtgttcctttggaagttgtagacataactatcataaagtatacaaaaggaagggtgtgcaatagggtatggataattaaacagcaaaaacaagaaaacacagatgtttagaaagtgacttcatttgtttgaagaaaactttcaaaacataattgtccatgtttattgttagcacaaagcacattacaaatgtaaatgtcttttggattactcaccattttgtattatccacgccctgtttcttttttttaatgtggagaatcaagagttttctggatggcacattgtaccattattgtgacatattcacttgagcatagaaatagactcacatggtaatactgagatatagtaccgtacacatcattaacaagggtgatgcaatacatttaaggagggaaatgtgacccctactatacaggataaagcaaatgtagatgcagatggaattaatgaaataggatttaagctgtgcttgcagatgtttgacattcctctttaaaacatctcatatggaaaaaccagtctattttggtcgatctagctttgacatacgcagtgaattggaatctagattacagagcatttacattggtcaaagatattctgaacatttagaatgaaatggatctcttgatctatctgggataatttaagggtttttttatatttataaatgctgctgattcaaaagtcaggaaggtaggattctagtgctagctctgccattatgggggcaaatcattttgccactcaagattttggtttcttctgtaaaataagctggttcaaacagatgctctctgatactcatggtatcttatgttttaatcacagaacaccaagagttccctggcttgtgatttacaggtaggaatcttgagaaccacatgaaggcagaaagccagaccttggtgtcaataatcttctacaaaacacctagccattgttccagaaatcccagagtcatcctgtatattccttcctcaaatgaaatccattttcttttttacaaccctttttctttttcttttttttttttattatactttaagttttagggtacatgtgcacattgtgcaggttagttacatacgtatacatgtgccgtgctggtgcgctgcacccactaactcgtcatctagcattaggtatatctcccaatgctatccctcccccctccccccaccccacaacagtccccagagtgtgatattccccttcctgtgtccatgtgatctcattgttcaattcccacctatgagtgagaatatgcggtgtttggttttttgttcttgcgatagtttactgagaatgatgatttccaatttcatccatgtccctacaaaggacatgaactcttcttcttaacatctgttgggttcactccataccatgcttcaactctattgctggggttgaatgaaatctggcatgaaacaaaagatcacttacttcctttccttcagggctcccatgcacttttccaccctccaaaaccagttcttactcttactcttttttttatctcagttctttgtaatatatgtctgctttccttttctctccgaaacaatgcaaagctaaaaggttcatccttagccattcctgctccctgaacattgagattttaaagtaattatgacagaattttaaggactcaaaatgcaactatttcatgaatgacatagttcattgatttccagcctttcttctttcctaaaatgccccagtgggggtccaactcccttcgtggcctcttttggatagctatggtattgtatgtattgatatttactttattataaataaaaacttgaaaaatattttctaaaagaatatattttctaagactaagaaatatgagaaaagtgacattgtgttacagttttgcaaatctcttgatttctgattctgcttcagcatttaatcttttgcaacatgctgttttgattgtcatatgtagcaaaattttggcctcactaaaaaatgttgtgggacaaaggactattttgctagcctttttaaggtaatcataaatattcttctttgatattataccaaaactcagcaacagtagtttcttaaagatgagttttgatgggggatttgaaactatatcagtgcattttttccttctctgttacatgaaaatctattagtctatgtcatatgttgaatataacttttaaccatgcataactttgtaacaatatgcatttatatttgaaaattattggttaactgagttacctagaacttccaaatcttgacacattttattatgtaatatcataattccaaaatcattaatatcaccaatatcttccaaaaagtattaagtattgggaagctttcgagctcagggcagttgatgtaagttttccaaaatttgaaatttttgtttgaaagattaaattttatcattagcaacgaacattttcagttattgctttggagtaacaagcttattttggtcattttcaagaaaatgtctgccaaatacccatgtctaaataatcatagtttgacagtcattctttcatgtaaaaaatgacactcactcacctttcctgtctcctcttgaaccccacatactcatcagcaaggaagaggtttttttacacttattatcataaacaaagatgggcacaacacacaggttcaatatgtttttggataaatactgattagatctcatttctccagagtgagccagtcagttatccttttgcctagtgctaaagtatcgatttcagcaagtcaattacccttctattttaatatgcctaaatggataaaggagtttctgatgtatacatattcatatacacacatttacatatattgcaagcacctatatccatttaggtgtatcaaactttggctctttcatgcatacatataccgtgctcatttatttaaaagagaaaaattactaaaaaaaatatttttttttaacaagaatctctgtttgctaaagttataaagatacctcaagcatgaccgtgatataaatattcatgttcagcattacagaaaagtgtgccttctagtatttaagtctcacaattcctataaactcttagggtctgtgtcactttttaaatcaggaaaaaatagtaagaagaaatgatcacttgaataatgagaaacaacctaaagtagtctattgcttccaagttgagataattgataaataaaataatttgagccaatttgtattagttcttctttttaaatttacagaaaactgttttgacttagtttcaaaaatatgcaaatattagactaactattattttttcttggcattattctagatacacctatacaggtagagcaaaacacagagcaagcactcagctggagaatttaatcaatgcagacaagcaaatcatttattttgttttgttttgtttttcctaaacagaagatttggatgcccaatttgtaaaattgtctccactctctttacttcattccactatatgtacaaagcacacatgtctaatagtagttattgctttgggataaaagagtatagagtggtgatggtggagaggatgtgtatatgtgtttgtgaagtttctctcaaagccaacataaagcaacatttgcctggaaggtttgtagatacatcctagaataccattacatgcatccagaaaggggggctgggataaagattgctagcctcagtaaaacttaaaaaacattccctaggttaagaatgtgccttttaggtcttaggtaaatgatacttttgactctatctatcttatctttcttagaaaatatagttttagtggtggcagcaggatagttcttaacctgcttgtcatatttttctgattttactttcacctactggaactgagttgaatatgggaaaatacaaactgtttctgcaaataaatgaatcatcaactggacttggtactgataagtgaaagagtttggaagaagcgttcaaactgatttccatttattaatcacaggtgtttttaaaaagtggctcaatgctaacatcatattaaaacttgttataaaacaaggaacccatagctacaaagaggcagaaaatagattaaggcttgaaacttatttggatattttatcatatttattttatttttaaaattataaattgacaaattatagctatatgtatagctaaattatagctatatgtatagctaaattatagctatatgtatagctaaattatagctatatgtatacatatatacaaaatgatgtcatgatttgtgaatacagtgtagaattagatcaagctaattaacatatccatcatctcacctggacttttgtttgttatagaacctcaatctagttgcttaaaccttttgagcttcaagttctccatttgtaaaataggagcagtaatatctttcaaagatcaaaggagatattatatgttcacatatgtaaaatgacccatgacatagcataagcgcttgatgaatgctcattattttcccttatattttccaagataatagtcctagtaaaaatagtcctaattaaattgattgaccatttttaattggaatttcaggatagcaatagggctaaaatactaggaagtattcccaatatcataggaatttagacattagaaaagtaacagtataatttttgagtctataagaaatttacctctttaataggaaagcaacatcattcagtactttggttactttctgatgtagtagaattagtcttctaattaagttgcagttaatgctattatacatcattatgtttaaatggagtatctggaagatgtctcaattagacagtcctcccaatgaagtgtgtcctgtaggttaatagaaatcacttcctttaccttggatagtgctgtttggaaaaaataccaaaggcctactcattaaaaggtcaaaattgtgcttctcagttaacactccattaagtcaaactgggagactttgccatgactgctgtgatttttgtcagtctggctgcaaatcaatcaagacgttacattctgaattacagtatgatgtacagtttgaggcagaataatgcacagtgagatcaataaaactcttcaaaagaaccaaaatctggcacttgtcagaataattcaccattttattattatgcaggtgtgatacaattcagaaaataatttgtaattaagaaaaatcagacaagatggagaacaagaacaaatgtggagatgacttccagaggcaagaaaaaacacttcacagaagaatggtaagtttaaaagagtaacattatctgctgtacaaagcattttgcactatgacagtaaatatcaagacactggaaaatctttttttgtccatgaagtacaagattgtgaatacttcttaactgctactgctgtgacaaatgtctgcagatagttaagttactggaaacctggaactgggtgtaaaatgtatacaatactaatgtctagggtaaaaattttgggtaaggccagtgtttcacctgactttgactacctggagcatgctgccttattctacttatagtctgggaaggagtcacagaaggcaaatgcatcttgctctttcggacttaagctgcacacagcctcccatttctttggctaagagaattgaaaattttcaaagacaaagattgatgagaaacattttagaagatgaatctttgtatttcttgtttttgctggaaatgactttcttcagggcacacacacaaggaaatataaaggaagaacttttctcaagaatattattaatgtagtcttgtcgaatattctagaaaatcataggatatttttatattttaaatatcagtacatagccaggaatgaaaaatattaccaacaaatttttttagatagccattcatttattatggactcaacattatgttttacttttttttttttttttttttgagacagggtctctctgtcacccaggctggagtgcagtggcacaatctcggcccactgcaacctctgcctcctacgttcaagcaatccttctgcctcagccctgcaagtaactgggaccacaggtgtgtgccaccacgccctgctaatttttgtactttttgtagagacggggtttcaccacattggctaagctagtttcgaactcatgggctcaaagtaatctgcccaccttaacttcccaaagtgctaggattacaggcatgagccaccgtgcgaggcataaaaggaatgcactaacattacatgtggcaccagtatttttaatctcctccttatttacctctctggagttcagtcttattccttgaattcatttgtatgcatccttaatatgcttgtgataatactttgtataaactataattttcttttctccaaaagtggatgtcatttttcagagttaagaaatgtgagaaaatctttgtttcttcactgggcaaatctaaccttttctaattcactaagtggttatgatcttttactggcatgtagtttttttgtgggggttcaggatacacatatacacatagttgaataggagaccctaaataaataataacattgcaagacttgtcaatcaaactgaaccagtttattggtgaactggagattccaacaactaaataaggctgaaagttggcacccagtgtgaagcattatagtgggtggcttcattaggagcttctggtatgtaaaaattgatccaaagcctaagtcctcatcatctaacttagaatggcattctaaaaattgtgcccaatggcaccatccatagaggctaacatggtggcaggaatcaaattggagcactgtggtggacaagatgtgcctctcagacctcacttcataggaggacatgttcccctgtctatcagcaggcagcctccatctgtcagccccttcagggtttgcctcagctgcagtgtactgtctggccaaggatcactatttcccagggcagaccacctccagtgactagtcaagacgggattagaaaagcttggccattttagctgcatgctgcataactctagcataattctaattccagatcttgctgtgaggatgacagaggttttatagggcttgaatccagacttcccctttgaccctttctgcttcttctgtttcccttccataggtgttaatctctaaaaacttcacctcagcctccgctttcagaaaagcttattggcagcaagcacaatatgaatttgttgaatttctgggcttccatatctctatttgctccttttctttgattgtttatgttgtgtataatgactttcattagatactaccttaagtgcctaacaatatttgtccttctctttaaatcaagcttgtctaacccatggcccatgggctgcatgcagcccggaatggctttgaatgtggcccaacatatttcttaaaacattatgagatcttaccaatttttttagctcatgagctgttgttagtgtcagtatattttatgtgtggcccaagacaattcttccaatgtcgcccaggaaagccaaaagattggatacctctgctttaaatcatgtgacaaatcctgtgttctacggctagacattttttggttctacagtgctattctgactattactgtgtagttgtctaagtcttttcttaggcctggaagtacttgttttatgaatctgagtgctccaatgttagatgcatatatatttaggataattttttcttgttgaattaaaccctttatcattaagtaatgcccttccttgtccttttttttttttttttttttttactgttgttggttcaaagtctgttttgtctgatataatagtgacctctgctcttttttgttttctgttggtgtgatagatctttctacaacactttactttgagcctgttggtgtcattacatgtgagatgggtctcctgaagacagcagatggatgagtcttgttttttttattcaacttgcaattctgtgccttttaactggggcatttagatcacttacattcaaggttaatattgatatgtgaggttttgatcctatcttgaagttgttagctggttgctttgtagtttctattttgtggttgctttataaggtctgtgggttatatatctcagtgtgtttttgtggtagtatgtatcattcttttgtttccatgcttagaactaccttaaggatctctgctaagggtggtctagtagtaacaaattcccttagtgcttgcctttctggaaaaatattatttatccactgtttatcaagcttagttggtgggatatgaagatcttgattggaatttttttttctttaaaatgctaaaaataggtcctcaatctctccttacttgtaaggtttctatttggaagtctactcttgatggggttccctttgtaagtgatacgaccttttcctttaaatgcctttgatttttttctttagtgttgcccatggagagtctggtaatgatatgccttggtgatgtttattttgtatagggtcttgcgggtgttccctggatgtcttgtatctgcatgtatctctctcaagcaagattagggaatttttcttgaattactctgacaaatgtgttttccaggtcatttgctttttttgcttctctctcaggaatgccaataaattataggtttgatagtttacataagtccatatttgttgaaaactttattcattctttaaaattcttttttcttacttttatctgacagggttaatttgaaagacttgttcttcaagttctgaaattacttctctgctttgtccagtctattgctatagcattccattctattttgaaattccttaagtcagtttttcaattccagaagctctgattgatttctttttaagatgtttatctctttcttcatttcctggattgctttagatcacttgttgttgttgttgttgatgatgattttcaatcttggatctcattcagcttctttgcaatccatgctttgaattctttatctttcatttctcagtttccattttggttaggaaccattgttggagagctactgtgatcctctggtagtgtcagtacattcggatttctcaagaatttttatgatggttccttctcatctgaagaagatggcacttttaatttttgtaattattttcatgtgggtaggatttctcttctttcttctttccctatattattgtatttatttctccttcccttcctcccattactccaggggttgtgactatagaggatgttggatagggtctttgggctttgcttctatagacctatgcccttctctccacgggttatatactgggatgtgcagttcaagggaatggccagtaggtggcgattatgggtaaaagccagctccagccaatgtggttgggtatatgcttatttatttaattttttatttatttattttattattttttattacactttaagttctagggtacaggtgcgcaacgtgcaggtttgttaaataagtatacatgggccgtgttggtttgctgcacccattaactcgtcatttacattaggtatttctcctaatgctatccctccgccactcccccaccccaagacaggccctggtgtgcgatgttccccgtcctgtgtccaggtgttctaattgttcagttcccacttatgagtgagaacatgcgatgtttggttttctgtccttgcgatagtttgctgagaatgatggtttccagcttcatccatgtccctgcaaaggagatgaactcatcctttgttatggctgcatagtattccatggtgtatatgtgccacattttcttaatccagtctatcactgatggacatttgggttggttccaagtctcttctattgtgaacagtgccacaataaacatacatgtgcatgtgtctttatagcagcatgatttataatcctttgggtttataccccgtaatgagatcgctgggtcaaatggtatttctagttctagatcccttaggcatcgccacactgtcttccacaatggttgaactagtttacagtcccaccagcagtgtaaaagtgttcctatttctccacatcctctccagcacctgttgtttcctgactttttaatgattgccattctaaccggtgtgagatgatatctcatgcggttttgatttgcatttctctgatggccagtgatgatgagcattttttcatgtgtctgttggctgcataaatgtcttcttttgaaaagtgtccgttcatatcctttgcccactttttgatggggttgtttgtttttttcttataaatttatctaagttctttgtagattcttgatattagccctttgtcaaatgggtagattgcaaaaatcttctcccattctgtaggctgcctgttcactctgatggtagtttcttttgctttgcagaagctctttagtttaattagatcccatttgtctattttggcttttgtcaccattgcttttggtgttttagtcattaagtccttgcccacgcctatgtcctgaatgatattgcctaggttttcttctagggttcttaaggttttaggtctaacatttaagtctttaatccatcttgaattaatttttgtataaggtgtaaggaagggatccagtttcagctttcttcttatggctagccaattttcccagcaccatttattaaatagggaatcctttccccatttcttgtttttgtcaggtttgtcaaagatcagatggttgtagatgtgtgatgttatttcttaggcctctgttctattccactggtctgtatatctattttggtaccagtaccatgctgttttggttattgtagccttgtagtatagtttgaagtcaggtaccatgttgcctccagctttgttctttttgcttaggaatgtcttggcaatgtgggctcttttttgatttcatatgaactttagttttttccaattctgtgtaatattggatagggatggcattgaatctttaaattaccttgggcagtaaggccattttcacgagattgattcttcctatctatgagcatagaatgttcttccatttgtttgtgtcctcttttatttcattgagcagtggtttgtagttctccttgaagaggtccttcaaatcccttgtaagttggattcctaggtattttattctctttgtagtaattgtgaatgggagttcactcacaatttggctctctgtttgtctgttattggtttctaggaatgcgtgtgatttttgcacattgattttgtatcctgagattttgctgaagttgcttatcagcttaagaagatttagggctgagacaatggggttttctaaatatacaatcatgtcatctgcaaacagggacaatttgacctcctcttttcctaatgaataccctttgtttctttctcttgcctgattgtcctggtcagaagttccaacactgtgttgaataggagtggtgagagagggcatccctgtcttgtaccagttttcaaagggaattcttccagtttttgcccattcagtatgatactggctgtgggtttgtcataaacagtgcttattattttgagataacgttccatcaatacctagctgattgagagtttttagcatgaagcgctgttaaattttgttgaagtccttttctgcatctgttgagataatcatgtggtttttgtcattggttctttctatgtgatggattacgtttattgatttgcatatgttgaaccagccttgcgtcccagggatgaagccaacttgatcttggtggataagctttttgatgtgctgctggattcggtgtgccagtattttattgaggattttcgcattgatgtttatcagggatattggtctaaaattctctttttttttgttgtgtttctgccggactttggtattaggatgatgctggtctcataaaatgagttagggaggattccctctttttctattgattggaatagtttcagaaggaatggtaccagctcctccttgtacctctggtagaattcggctgtgaatccatctggtcctggactttttttggttggtaagctcttaattattgcctcaatttcagagactgttattggtatattcagagattcaacttcttcctggtttagtcttgtgagggtatatgtgtccaggaatttatccatttcttctagattttctagtttatttgcatagaggtgtttatagtattctctgatggtggtttgtatttctgtgggattggtggtgatatctcctttatcattttttattgtgtctatttgattcttctctcttttcttctttattagttttgctagcggtctatcaattttgttgatcttttcaaaaaaccagctcctggattcattgattttttgaagggttttttctgtctctatctccttcagttctgctcttatcttagttatttcttgccttctgctagcttttgaacttgtttgctcttgcttctctagttcttttcattgtgatgttagggtgtccattttagatctttcctgctttctcttgtaggcatttagtgctgtaaatttccttctacacactgctttaaatgtgtgctagagattctggtacattgtgtctttgttctcattggtttcaaaaagcatctttatttctgccttcattttattatttacccagtagtcattccggagcagattgttcaatttccatgttgttgtgcggttttgagtgagtttcttaatcctgagttctaatttcattgcactgtggtctatgagacagtttgttatgatgtctgttcttttacatttgctgaggagtgctttacttctaactatgtggtcaattttggaataagtgcaatgtggtgctgagaagaatgtatattctgttgatttgggttggagagttctgtagattgctattaggtctgcttggtgcagagctgagttcaagtcctggatacccttgttaagcttctgtctcattgatcgtgtaatattgacagtggggtgttaaagtctcccattattattgtgtgggagtgtaagtctctttgtaggtctctaaggacttgctttatgaatctgggtgctcctgtattgggtgcatgtatatttaggatagttagcccttcttgttgaattgaattgatccctttagcattatgtaatggcgttttttgtctcttttgatctttgttggtttaaagtatgttttatcacagactaagtttgcaacctctgcttttcttgctttccatttgcttggtagatcttcctccatccctttattttgagcctatgtgtgtctctacacatgagttgggtctcctgaatacagcacactgatgggttttgactttttatcgaatttgccagtctgtgtcttttaattggggcattacctcatttacatttaaggtttataatattatgtgtgaatttgatcctatcattgtgatgttagctggttatttttctggttagttgatgcagtttcttcctagcattaatggtctttacaatttgacatgtttttgcagtggctggtaatggttgttactttccatgtttagtgcttcctttaggagctcttgtaaagcaggtctggtggtgacaaaatctctgagcatttgcttgtctgtaaaggattatattcttccttcacttatgaagcttagtttggctggatatgaaatcctgggttgaaaattcttttctttaagaatgttgaatattggcccccactctcttctggcttgtagagtttctgctgaaagatctgctgttagtctgatgggcttcccgttgcaggtaacctgacctttctctctggctgcccttaacattttttccttcatttcaaccttggtgaatctgacaattatgtgtcttggggttgctcttcttgaggagtatctttgtggtgttctctgtatttcctgaatttgaatgttggcctgccttgctaggttggggaagttctactgtataatatcctgaagagtattttccaactcggttccattctcccggtcactttcaggtacaccaatcaaacgtagatttgatcttttcacatagtcccatatttcttggaggctttgttcatttctttttactctttttcctctaaacttctcttctcatttcatttcattaatttgatcttcaatcactgataccctttcttccacttgatctaattggctactgaatcctgtgcatgcatcatgtaagtctcatgccatggttttccgctccttcaggtcatttaagctcttctctacactgtttattctagttagacatttgtctaatcttttttcaaggtttttagtttccttgtgatgggttcgaacatcctcttttagctcagagaagtttgttattaccgactttctggagccacttctctcaagtcatcaaagtcatcctccatccagctttgttccattgctggcgaggagctgtgatcctttggaggagaaggggcactatggtttttagagttttcagcttttctgctcttctccccatattatggttttatctacctttactctttgatgatggtgacctacagatggcgttttggtgtggatgtcctttttgttgatgttgatgctattcctttccatttgttagttttccttctaacagtcaggtccctcagctccaggtctgttggagtttgctggaggtccactccagaccctgtttgcctaggtatcaccagtggaggctgcagaatagcaaatattgcagaacagcaaatattgctgcctgatccttcctctggaagcttagtctcagactggcacctggctgtgtgaggtgtcagtgggcccctactgggacgtgtctccatgttaggctacacgggggtcagggacccacatgaggaggcagtctgtccgttctcagagctcaaatgcttcgctcggagaaccactgctcttttcagagctgtcatacagggacatttaagtctgcagaaatttctggtgccttttgttcagctatgccctacccacagaggtggagtctacagaggcaggtgggcctcttgagctgcggtggtctccactcagttcgagcttcctggccactttgcttacctactcaagcctcagcaatggcagacgcccctcccccaaccaggcttgccaccttgcagtttgatctcagactgctgcgctggcagtgagcaaggctccgtgggtgtgggacccaccaagccaggcacgggatataatctcctggtgtgccatttgctaagaccattggaaaagcacagtattcaggtgggagtgtcccgattttccaggtaccgtctgtcacggcttcccttggctaggaaagggaaatcccccgacctcttgcatttcctgggtgaggtgatgccccactctgctttggctctgcctccatgggttgcacccgctgtctgaccagtcccaatgagatgaaccaggtacctcagttggaaatgcagaaatcacctgtcttctgcatagatcatgctgggagctgcagaccggagctgttcctatttggccatcttggagtggatcccctgaatgattatttttcactcagagaagctctcctgttgcctctgtcaatgggttaatctgtgggatgcacagcagtttgaactccctgcttagcctcagaggggcaggggaaaagatgggcagggccagaccaggtaggttccctgatggtaagtgtaagctccagtgctgagggtgaatccagtgggcagccaccaagcacccagaggtgggcctaggtgtggagctggcaaacattctctgctggagtgggtgggacagtggaggcagcctaaactaataatccagaagagtggatgctccagttgcttgcagttctgtctggaaatgaaattgagaggccctcccagtaccagggtctctgcataggaaggctgggtgtactcaagctgctgatccaggtgagggtgtgctctgaatgtctggagatctgcctggtcttggagtggagagggcctcacttcaccacagtctctgcacaggaagggtagggtggctcaggctcctaatcctggcaagcagcttctctgattgcctggagatctgcctgagatagtttattttcagtgcaaaattgagctagaagagcaaagaaaatgttaagtatttggagaaatctaaggaaacattgattttgcaaattaatagtatggggtgaaattatgagtaaaatacgtaataatgacatggaagttgaaggtcataactgaagttagagtgttctaaagacctaagattgctttggagtcaggtaataaatactgatcaaatttgtatacaacaaattaggtatacatattaaaattctaaggcagccattaaaagaataaaaatagaatatataacttaaaagcaggatagaaaaaaagaacaattaaaagatcaatttaaaaaacgaaatgaagaaaagaaaacagaaaacagaaaatgcagaatagctgtaagtacagaatacatattaaaataaatccaagtttaagtcatagatatttatgccacaaggaaaatataaatttatattttcttatcgcatagcctctaatatagtatatatatcaagaattagacaaatccactatcatattgggaggttataattcacctctctccttaattgatagatcaagtagacagaattttttttttttttttttttctctgagatggagtctcgctctgagatggagtctcactacactcgctccagcctggagtgtagtggtgtgagctcacctcactgcaacctctgccttctgggtttaagtgattctcctgcctcagcctccggagtagctgggactagagtcatacaccaccatgcccagctaatttttgtatttgtagtaaagacagggattcactatgttggtcaagctggtctcaaactcctgacctcaggtgatctacccgccttggttgcccaaagtgctgggattacaggtgtgagccaccatgcccagcccagaagaggatttaaaacaatataattagcacacaatattagagtcattatagaactctgtatctaacaaagcagaagaattatagtttgcatattcacataaagaataatgaaaattgatcacaaaacgagacacaaagaaagatgccgtaacattcacagaatatattcttggatcataatgaaattaattttgaggtaaaagacaaaataatattttaaaatttggaaatggaacatatgtctaatcaattcaggtgctaaagaggaaattaaaaagtctggaaaatattgagaaaatagacaaagttggaggcatcacactaccctgcttcaaactataaggctaccataaatgaagcagcatgatgttggtacgaaaacagacacatagaccaatggaacacaacagataacctagaaataaagccacacacatacaaccatctaatcttcaacaaagctgatagaaacaagtgatgaggaaaggactccttttattcagtaaatggagctgggatagctggctagctatgtatagaggaatgaaatggacctctgtttcaccacatacaaaaattaactcaagaaggattaaatatttaagtgtgaaacctaaaagtataaaaatcctgtaagaaagcctcagaaacaccattctggatgtaggccttgggaaataatttatctataagccctcaaaagcaattgcatcacaactaaaaattggtaagtgggacctaattagactaaagagcttctgcacagcaaaagaaactatcaactgagtaaactgacaacctacagaatgggaaagaaatttgcaaactacgcatccaacaaatgtctaatatccagaatctataagaaacctaaacaatttagcaagtgaaaaccaaataaccccattaaaaaatgggcaaaagacatgaacagacacttctcaaaagaagacatacatgcagccaacaaacataaaaaaatgctcagcatcactaatcatcagagaaatgcaaatcaaaatcacaatgagatatcatctcacactagtccgaatggctattattaaaaagtcaaaatggctattatttttaaaagtcaaaaaataacatgttggtgaggttgtgggaaagggtacacttatacactgttggtgggaatgtaaattagttcagctactgtggaaagcattttggagatttctcaaaggacttaaaacagacctaccatccaacccaacaatcctattattggatatatacccaaaggaaaatacattgttctaccgaaaagacacatgtacttatatgttcaccatcatgctattcacaacagcaaagacatggagtcaacccaggtacctatcaatggtggattggattaagaaaatgtggtacatatatcccatggaatactatgcagccataaaaaatgaaatcatgttttttgcagcaacatggatgcagccagaggccataatcctatgcaaattaatgcaggagtagaaaaccaaatactgcatgttctcatttgtgagacagtcggtactcacagatataaagatagaaacatctttagacatagatactgtctaaacattgcagactactagaggagtagggagggggttgtggactgaaaaactacctattcactaccttacagctcactacctgagtgtcaggatgtgcaccccaaacttcagcagcatgtaatatatgcctatgtaacaaacttgtacatgcatcccctgtacctaaaataaaagttgaaattatttttaaaagtctacttataaaaagttagaaaacaaaggaataagatcataataactaattctatttggcaaatttcaagaaaccattaggatcaaaaatatagcaaaagttactaaagataaaatatgcagaaatcaactgtatacagatcagaaaaacaaaatgtaattttaaaatacgatttcaacactataaaatatgaaatctaagaacagatttactaaaagaagtgcatgatgtctacagaggaaacaaattagaaaactttatctaaagccactaaatgtgactttaaaaattgtgtatagtaagtttatgaattggaagtttcaatgctataaaaatttcagtttactctgattatagtttcaatttaattacaaatcaaagtttcaatgaactttttgtagaacttgacaagttgatatttaaatatttatatgaaaatgcaaatgaccatgtaatggtacagctgaagaaggaaaaattggtataacttgattttaaagatattaaaagttattgtaaagctatagtaattaagatggtgtgatgtttgtgcaagactagaaagagatcgatggaccagatacatatatgaggagaccagtaagaatgttcccagaaatactgttcacaatagcaaaattctgcaaacaactcaaagatgcatcaatatgagattgatttaatggaatccatttacacaatggaatattatatagcagtgaagataaatgaactactcaaatataatacatacaatgactctcagcaaataatatataaaaatctgagaatattaaatgttttacccttttttaaaattaaaaaacctaaaagtgaaaaatacgtttaaagaaatacataggcatgcactaagtctagaaaaaaaaaaagaaataaagctagggaagaataataaacataacactcagggggatgattatcttgtgtagagggatccaggaaaaggtgatggaaggcatactggttagataaggtaattttcaatatcctaccttttgtttttgatactgggttttaggtggggggtttggggtgttaaatataaatatctaaatagctattaagtaaaagcacatcatacaatgctaaaagtgtattatgaatcagggattatgattcaattttgtgtgtccaaagcatcaaaaaatcaaaattcaagttctgatttgatagtggaatctctaataaaagacctcagattcctttttgagctgaatgcaaagcaaattataatcattaaaatagatggctttttgatcattactatggtaaaggctattactgccaactaaacataattttattagaatgttaattctatagttttcaatcctagacactacctatttaggatgagcaaaaacttactatgaagaaaagcacttgcataagaaaagatattaaatccatattcgatatactttcttcacatcttttcttttagcttttaccccactttattactccttttcactttcccttttgattctgtctcttctctccaacctgtaagtgttgaaatgctccacaactcagttattggttctcacccatctatacttacctccttggtattttcctccaattgtatggttttaaatagcattcatatttggtgactccaaattgtatatccctaacccagacctccctcccaaagtctaaattcatatttcaatatgtcttcttgatatctctgcttatatgtctaatagacatctcaaacgcaagctgttagaaactgaactcctgatctaaacctgctccactacagccttctctatctagttcaaaggcaattccattgctctccttctcagctgccaaacttgggagtcattcctgactcttccatttccctctcatcatacatccaatctattagtaaagttgcttggttcagtcttcaaaatctatatagagcttgctccttctctactgccatccgaatctgagctaacaccaccctctggatcagtggcttaactgccaaactgatgcattctaaatttgttctactgaaatctattcctgacaaaacagacaaactggtcctttgaaaatataagtcagatcggtctgttccaagatggccaaataggaagagctctggtctgcagctcctagcatgatcgacacagaagacaagtgatttctgcatttccaactgaggtacctggttcttctcattgggactagttggacagtgggtgcagcccacggagggctagctgaagcagggtggggtattgcctcacccaggaagtgcaagggtcgggggatttccctttcctagccaagggaagctgtaacagactgtacctggaaaaacaggacattcctggccaaatactgtgcttttcccatggtcttagcaaccagcagaccaggagattctgtcccatgcctggctcggtgggtcccatgcccacagagccttgctcactgctagcactgcagtctgagatcgatctctgaggctgcagcctggcagggggagggtcgtctgccattgctgaggcttgagtaggtaaacaaaatggccaggaaactccaactgggtggagcccaccgcaactccgcaacgcctactgcctatatagactccacctctgtgggtagggcatagctgaacaaaaggcatcagaaacatctgcagacttaaatgtccctgcctgacagctctgaagagagcagaggttctcccagtatggtgtttgagctctgagaacagacagactgcctcctcaagtgagtccctgacccccgtgcaacccaactgggagacacctcccagtaggggccgagagacatctcatacaggtgggtgcccctctgagacaaagcttccagaggaaggatcagacagcaatattttctgttccacaatatttgctgttctgcagcctccactggtgatacccaggcaaacagggtctggagtggacccctaacaaactccaacagacctgcagctgagggaactgactattaaaaggaaaactaacaaatggaaaggaatagcatcaacatcaacaaaaaggacatccacaccaaaaccccatctgtaggtcaccatcatcaaagagtaaaggtagataaaaccacaaagatggggagaaaccagagcagaaaacctgaaaattctaaaaaccagggtgcctcttctcctccacaggatcgcagctcctcaccagcaatggaacaaagctggatggagaatgactttgatgagttgacagaagtaggcttcagaaggtcgttaataacaaacttctctgaactaacccatctcagagaatgttctaaccgatcgcaaggaagttcaaaaccttgaaaaaaggttagacaaatggctaactaaaataaacagtgtagagaagtccttaaatgacctgatggagctgaaaacgagaacttcatgatgcatgaacaagcttcaatagctgattcgatcaagtggaagaaaggatatcagtgattgaagatcaaattaatgaattaaagcaagaagacaagattagagaaaaaagagtaaaaagaaaagaacaaagcctccaagaaatatgggactatgtgaacagaccaaatctacatttgattgatgtacgtgaaagtgatgaggagaatggaaacaagttagaaaacactcttcaggatattatctgggagaacttccccaacctagagaggcaggccaacattcaaattcaggaaatatagagaacaccacaaagacattacttgagaagagcgaccccaaggcacataattgtcagattcgtcaaagtagaaatgaagaaaaaaatgctaaaggcagctagagagaaaggtcgggttactcacaaaggaaagcccctcagactaacagcggatctcttagcagaaaccctacaagccagaagagagtgggggccaatattcaacactcttaaagaaaagaattttcaacccaggatttcatatccagccaaactaagcttcaaaagtgaaggagaaatataatcctttacagacaagcaaatgctgagaaattttgtcaccaccaggcttgccttatgagagctcctgaaggaagcactaaacatggaaagtaacaaccagtaacagccactgcaaaaacatgcaaattgtaaacaccatcgatgccatgaagaaactgcatcaattaatgggcaaaataaccagctaacatcataatgacaggatcaaattcacacataaaaatattaagcttaaatgtaaatgccccaattaaaagacacagactggcaaatcggttaaagagtcaagacccgtaagtgtgctgtattcaggagacccagctcacatgcagagacacacaaaggctcaaaataaagggatggaggaagatctaccaagcaaatggaaagcaaaaaaagcaggggttgcaatcttagtctctgataaaacatactttaaaccaacaaagatcaaaagagacaaagaacaccattacataatggtaaaggaatcaatacaaaaagaagaactaactatcctaaatatatatgcacccaatacaggagcacccagattcataaagcaagtccttagagacctacaaagaaacttacactcccacacaataataatgggagactttaacaccccactgtcaatattacacagatcaacgagacaggaggttaacaaggatatccaggatttgaactccgctctgcaccaagctgacctaatggaaatctacagaactctccgccccaaatcaacagaatatacattcttctcagcaccacatcacactttattctcaagttgaccacgtagttggaagtaaagcactcctcagcaaatgtaaaagaacagaaatcacaacaaacagtctctcagatcacagtgcaatcaaattagaactcaggattaagaaattctctcaaaaccacacaactacatggaaattgaacaacctgctcctgaatgaccagtgagtaaataatgaaatgaaggcagaaataaagatgctttttgaaaccaatgagaaaaaagatacaatgtaccagaatctctgggacacagttgaagcagtgtgtagagggcaatttataccactaaatgcccacaagagaaagcaggaaagatctaaaatcgacatcctaacatcacaacgaaaagaactagagaagcaagagcaaacaaattcaaaagctagcagaaggcaagaaataactaagataagagtagaactgaaggagatagagacagaaaaaacccttcaaaaaatcaatgaatccaggagctggttttttgaaaagatcaacaaaattgatagaccgctagcaagactaataaagaagaaaagagagaagaatcaaatagacgcaataaaaaatgatataggggatatcaccaccgatcccagagaaatacaaactaccatcacagagtactattaacacctctctgcaaataaactagaaaacctagaagaaatggataaattcctggacacaaacaccccccaagagtaaacctggaagatgctgaatctctgagtagaccaataacagtctctgaaattgaggcaataattaataacctaccaaccaaaaaaagtccatgaccacacagattcacagtggatttctactgcaggtacaaagaggagctggtaccattccttctgaaactattccaatcagtagaaaaaggggcaatcctccctaactcattttatgaggccagcatcatcctgataccaaagcctggcagagacacaacaaaaaaaaagaattttagaccaatatccctgatgaacatcaatgcgaaaatcctcaataaaatactggcacaccgaatccagcagcacatcaaaaagcttatccaccatgatcaagtgggcttcatccctgggatgtaaggctggttcaacatatgcaaatcaataaatgtaatccatcacgtaaacagaaccaacgacaaaaaccacatgattatctcaatagatgcagaaaaggcctttgacaaaattcaacaacccttcatgctaaaaactctcaataaactaggtattgatggaatgtatctcaaaataataagagctatttatgacaaacccacagccaagatcatactgaatgggcaaaaactggaagcattccctttcaaaactggcacgaaacagggatgccctttctcatcactcctattcaacattgtgttggaacttctggccagggcaagcaggcaagagaaagaaataaagggtatttgattaggaaaagaagaagtcaaattgtccctgtttgcagatgacatgattgtatatttagaaaaccccaaaatctccttaagctgataagcaacttcagcagtctcaggatacaaaatcaatgtgcaaaaatcataagcgttcttatagagcaataacagagaaacagagagccaaatcatgaatgtgctcccattcacaattacgataaagaaaataaaatacctaggaatccaacttacaaggaatttgaaggacctcttcaaggagaactacaaaccactgctcgatgaaataaaagaggacacaaacaaatggaagaatattctatgctcatagataggaagaatcaatcttgtgaaaatggccatactgcccaaggtaatttatagattcagtgccatcgccatcaagttaccaatgactttcttcacagtattggaaaaaacgtctttaaagttcatatggagccaaaaaagagcccacattgccaagacattcctaagcaaaaagaacaaagctggaggcatcatgctacctgacttcaaactatactacaaggctacagtaatcaaaacagcatggtactggtaccaaaatagatatatagaccaatggaacagaacagaggcctaagaaataacaccacacatctacaaccatctgatatttgataaacctgacaaaaacaagaaatggagaaagcattccctatttaataaatgatgctgggaaaactggctagccatatgtagaaagctcaaactggatcccttccttacaccttatacaaaaattaattcaagatggattaaagacttacatgttagacctaaaaccataaaaaccctagaagaaaacctaggcaatatcattgaggactaggcatgggcaaagacttcatgaccaaaactccaaaagcaatggcaacaaaagccaaaatagacaaatgggtctagttaatctaaagagcttctgcacagcaaaagaaactaccatcagagtggcaggcaacctatggaatgggagaaaatttttgcaatctactcatctgacaaagggctaatatccagaatctacaaagaacttaaacaaatttacaggaaaaaaacaaacaatcccatcaaaaagtggacaaaggatttgaaaagacacttctctaaagaagacatttatgcagccaagagacacatgaaaaaatgctcatcatcactggccatcagagaaatgcaaatcaaaaccacaatgagataccatctcacaccagttagaatggcaatcattaaaaagtcaggaaacaacagatgccggagaggatgtggagaaataggaatgtttttacactgttggtggcagtgtaaattagttcaaccattttgtagaagacagtgtggggattcctcaaggatctagaactaggaataccatttgacgcagccatcccattactgggtatatacccaaagggttataaatcatgctactataaagacacatgcacacgtatgtttactggggcaccattcacaatagcaaagacttggagccaacccaaatgtccatcaatgatagactggataaagaaaatgtggcacatatacaccatggaatactatgcagccatcaaaatgatgagttcaagtctttttcagggaaatggatgcggctggaaaccatcattctcagcaaactatcacaaggacggaaaaccaaacactgcgtgttctcactcataggtgggaattgaacaataagaacacatggacacagggtggggaacatcacacactggtgcctgcagcggggttgtggggagtgctgggggtatgggggagggatagcattaggagaaatacctaatgtaaatgacgagttgatggttgcagcaaaccaacatggcacatgtatacctatgtaacaaacctgcacgttgtgcacatgtaccctagaacttaaagtataataaaaaagaaaaaaaaggaaaatgtaagtcagatcatgtcactcctctactcagtacatttcagtggattctttttcactcagggtgaaaatgaaagcctttgcaaagtcctaaaaggtccttcagaatctgattgcttctcctattccccatcgcttcttgccctgggctgacctatctgctgctcctcaaaccttccaggtactgcctttgctctaactgctgcctctggaagggtcttcccccagatgtttgtttggctaacaccttccatttcttaaagtctgtgctcaaattttgtgctgagccccctttttaccaataagaaccaattgttaaatattcaagaattttgtaagctatttttcaaacctttggtagcttgaaattaaccagagcggaagtatttacaccacaggaaataaggcataccctgaaaatttcatttaaaattgtgatttttcacattctgcctctttaactcaattttttctgattccagtctactttttctttctctaatagcacatgccatctaataacttactgtttaatgtgcttatttattgcctttattatttattgactatctgcaagctctagagttcaaggttaactagggtaaggtttttgtttagtttactgatgtaactgaagatacaatatctaacacatggtaaggactcaataaatatgtatttattgaaaaataaaataaaaggtggttttattttttattgtactttaagttctgtgatacatgtgcagaacatgcaggtttgttacataggtatacatgtgccatggtggtttgctgcacccatcaacctgtcatctctgttttaagccctgcatgcattagctatttgttataatgctatccctccccttgcccccgacccctcgacaggccccagtgtgtgatgttcccctctctgtgtccatgtgttctcattgttcaactcacacttttgagtgagaacatgtggtgtttggttttctgttcctgggttagtttgcatagaatgatggtttgcagcttcatccatgtcgctgcaaaggaaatgaactcatcctttttgatggctgcatactattctatggtgtatacgtgccacatttcctttatccaatctatcattgataggcatttggtttggttccaagtctttgctattgtgaatagtgccacaataaacatacgtgtttattgttataatcctttgaatatatacacccagtaatgggattgctgggtcaaatggtatttctagttctagatccttgaggaattgccaaactctcttccacatggttgaactaatttacactcccatcaacagtataaatgtgtttctatttctccacatcctctccagcatctgttgttttctgactttttaatgattgccattctaactggcatgagatggtatttcattgtggttttgatttgtatttctctaatgaaaagtgatgatgagtttttttcatgtgtctgttggctgcataaatgtcttctttagagaagtgtctgttcatatcctttgcccactttttgatggggttgttggtttttttcttgtaaatttgaacaaggtgttttatcttcctgtgagataggaacaagtaaaacttataagtaactttcagtatttttatatcaatcactttaacttgttctttgaattgactaataatagactaaatggcaaagcaggggcagtgacttttcaaatttcaaataattttctctgaatgacaaaacaagttatctttagtaagaaatgtttaccaattgaatgtatatgaaagcagctgagaaatgttagagatggcttcataaaggagatattttgaataaaatttgatggatattttccattcttgcccaaatgctagacagcctacataacttaaatttcttttaagtgcttattccacaaacagaataatacacccagttcataaagcaatgatgcatggtgaagttaatttttgatagctatatgttatttttatatttacttttcaattaaggaaattgactttcaattgttagaaagcagttagctaccctgtctttgaccattccaaaattgtagagaatattagagttgaaataaagtaaattatttcatatttatatttttttttcattgctaagatttccataagcaaagattggactaaatttagtgttaactaccaacaatttcacttcgtggctactgaaaggaaaatgagtgtgtgtatacacatgtgtacacacacatatctggaaatcacatacttcattttaacaatctcttttttgaaattatatgtttaatttattgactgcccaaaacattcaccttcaatttgcctgggtattaccacttaacataggatttaggctgggcgtggtggctcacgcctatattgccagcactttgggaggctgaggtgggtggatcacctgaggtcaggcatttgagaccagcttggctcacatggcgaaaccccatctctactaaaaatagaaaattagccaggcgtggtggtgcacacctgtaatcctagctactcaggaggctgaggcagaagaatcgcttgaacctggaaggtggaggttgcagtgagccgagatcatgccactgcactccagcctgggcaacagagagaaacgctctctctcaaaaaaaaaaaaaaaaaaaaaaaaaaaaaaaaaaaaagtacgatttaattgacttctgactctcaatattcccaacaggtaagttagctttcaaatgacttcagcatgtaaacatgataaaaatatttgaaatttaatgagatggcaaaattcacacacgctaaaaaaagcggaccagaaacctccatatttattcaactgtttattgatcagatgttattaagatatcttatatactagtggaagtgtcttctctttgcaatgtgcttttaaatattgccttattggtttctcttgtacttgctagcaaaagtgtaaagtcattttcatgctgtgattcgagaaatgtcaaagcattaaattatagccacttaaaataattacatttctctagctacaaatgataaaataaacatctgaagtttggtgcatgtgctttgcttgtgttgacacactagtatcttctccaaggtgtggaaaccaataacagtttggaaattttaagcataatattaatattttccattataggaaacaatagtttatataaaccaaaagttttacacaaaagtaaatcaaatgggaagaagctcttttaaaaagacaaatctctacaaatgaaccttatacttatttccagtcactttaaaattcagtgaaatactagaggccttttaggaatcttaaatatgcttcccagaaaggtttcactttcttaacttttctaaatatagagaagctcccccagattgttatttccttggcttattacagttactatagagaaatattacagattaataaagtaaatcctggagtgtagaaggatttatacaaattagattgcacatgagaaataaatttgaaaatgtttttgtgataaagatactaaagctgtgaacgctcctataaatctaacatttacattttataatgattatgggacctcacttcaataagtctcatgcttacagaattctaacactccaagttctttttcaaattactcacagtcatttctgccaatgttaccatggactcatttcaaaattctaggtatttattgctctaaagtgtgtcataaaatgttaaatcaacctgctagcctgaggtctacaagatattttatgacttaaacagataccacacggttgcttgaagtcattgccctggcctttctttcctctgaatccaaaggcattgagtctagcacaaggcagtctaggtgacagagagcttgctggtacccagtagttgggtcagcaaaggtggtttgggagtttgtgatttttagtgtgataaatatatcaacaaaaattgtccagcaactgcacatattgtaggtcatgttttaaagcttttatcatttaaaatcatattctgctgcagatcaatgaaaacctatcatggatgaaaaattaagggttatttttcctttttttcccacctcataacatgaatgttgatgataggctgcccagggctgatgcaggtgctcaaccatagtgtcagagacccaagatctttttgcatcctttgtacactgccatgcttagtatattgtctttcactctcatccttgtcatttcttagtcacagcatggctgatgtagcaacaagcattatatctgcattccaggcaagaagaaagaaaaagaagcaaagatctacatgggccatatcttttctttttttttttaattgagaatgtaatgcctttctagaagctcactccagaagactttctgttatatcttttgggttaaaagtaactcacatgaccacttccagaccaataattgaccaaagacaattagataactacaatggtttataccaatggagctttgcttcctagcctatggtgagaactgaaagtctctgaaatcaaggtactgtaggcaccacctgaataatatctagcagcagggaaaggttattgaatgttgtgtaggcaatgaagagatattttcatatacaccattctgcctcattcctcttctctttttttttttttttttgacagtgctggcaattttatttaaaatctgatcaatttctttttttattttattattattatactttaagttttagggtccatgtgcacaatgtgcatgttagttacatatgtatacatgtgccatgctggtgtgctgcgcgcattaactcgtcatttagcattagatatatctcctaaagctatccctcccccctccccccaccccacaacagtccccagagtgtgatgttccccttcctgtgtccctgtgttctcattgttcaattcccatctatgagtgacaacatgtggtgtttggttttttgtccttggatagtttactgagaatgatgatttccaatttcatccatgtccctacaaaggacacgaactcatccttttttatggctgcatagtattccatggtgtatatgtgccatattttcttaatacagtctatcattgttggacatttgagttggttccaagtctttcctattgtgaatagtgccgcagtaaacatacgtgtgcatgtgtctttatagcagcatgatttataatcctttgggtatatacccagtaatgggattgctgggtcaaatggtatttctagttctagatccctgaggaatcgccacactgacttccacaatggttgaactagtttacagtcccaccaacagtgtaaaagtgttcctatttctccacatcctctccagcacctgttgtttcctgactttttaatgattgccattctaactgttgtgagatggtatctcattgtggttttgatttgcatttctctgatggccagtgatggtgagcattttttcatgtgttctttggctacataaatgtcttcttcagagaagtgtctgttcatgtccttcgcccactttttgatggggttgtttgtttttttcttgtaaatttgtttgagttcattgtagattctggatattagccctttgtcagataagtaggttgcgaaaattttctcccattttgtaagttgcctgttcactctgatggtagtttcttttgctgtgcagaagctctttagtttaattagatcccgtttgtcaattttggcttttgttgccattgcttttggtgttttagacatgaagtccttgcccatacctatgtcctgaatggtaatgcctaggttttcttccagggtttttatggttttaggtctaacgtttaagtctttaatccaccttgaattaatttaattcttagctttagcaaatagcacacaaagccaaagtataaagtacagcagcaattgtctggcaacatgctttgactttcaccttcatttgctacctagtttttaggtataaatggttataaatgacatccagacttcttaatatgctgatttgtaagttagccttagtcccatgatataagtgaaggataatattcaagacttggctttgattcttagttttggcacttacaagctatgggactatttgagggatgttaactaaagttcaatattctaatttgtaaaataggagtactatcagttattgtggggatatatgccacagtgtggttgtacagattacaaagttgaattgcttagcatggagcgtgatattttccaagtgttcaataaatgtttgcagttaggattgttcattgtcattactattcctatgcccagggcttattgaaccactaaaaatgacctccacttatatttattgtgtagtatataaggtgggaggtgggggagaatccacagtgtgtccagtgcagaaattctagcctcaggataataactaaactttcagcatatatatataatagtttgtataaactatatgtatgtgtgtgtgtatatatatatatatatatatatatatataccctattttaataccctatttaccctattattcacatatcatgtgattacaaaccttagaatcaaaggaacacttctttctccaaaactggggacctcacaggaatcaagactgttccaggaatttttagaattcaagagagaagtgggttctgcttggatacttcatcaaggccattgcaatgtaatttcatttaaacttttaatgttaagccaaacttctacaaataaataagtttatatcagattctgagctattgtctattttaatattttaaattaattgtccaattttaataatagttttagacatccatgtttacatagagcagatctcaccctctgttcattaaaacaagtcacttattagattcatttttaactttactttgcaaaagttagcactgttgaccctgtcataaaatcaaatggcataaagtgacaatagatgtaaaatgtaaagaaatataaaattctttaaaaagcaaaagaaatcacattcgaagcacagagattcagagagccttgtagtgatttaaactgagtgacctaggatggtacaagcattactcatggctctgtcagtttctcttagcctctttttcaagtataataaaaataagcctcccagctgaacatgtctggtcatggggattttactcaataccaccaaaagatcactaagagggtagccttagacctccaaggccattatctaacaaactttattgaacacctactatgtaaacacagtgcaaaacttgttggaagtatttgattttgagtcttttttttttaagatagtattggaaattgctaagtaattgcctttttttctttgatgctaaaatgtaaaatctgttatagtttttctacaaattttccaagggattaaaaagggaaaacatttgaagctccagaatattctaagggtagaagatcgcttgctgggactttctctaaaacttgaaaaattaaattattacatgcggggaaatacatggaaatagtaggacagtgctctactatgttccttacttagcaaaaaatacacgtttatataaaatatgttcctctttctgttcactacagtgttcgtgtaatttctatgtcctctaactgaaaacctttcaatttaccatcgttctagatcagtttccagttcagaatccagttttttggtgtagttttagttgcatccattatgtcaagagaagttattgccactttattttctgtgtcatcgttcctcttcatccttagtttctctaaacccacaggttgcaaatcctttggggataaagagtgctgacaatttgggctaactctagtcaaaagttggtcttctaatccctcccatatccagcagttattgccttcccacccaataccctgagcaactccagtcaatctgtccacccatgcctgtccacaaccatgctttcttacctcctcttccattattgtgctgcaacattaaggttttttttctgatcagtgttaataaccaatgcctcaaatatctatcttttatgccaacatttggtagatttgagaacttgaagtcttaggggagcaggttggagaaagcttttcgtagcatcatgggctcttttctctttaggtaactcgagagcatatacagtggccctccaaagaccatttctacctttgccatccaacctggggaacaaataatccctatataatttgctaaattcttactgacctactcatcagctctagcttatttgttcttgtcttccatataaaaggttttataatttttttttctttttattgatttgctatagcttaagcaaaagttatccatacactagatacttagaaaatcattcagctataaaatagcagtaggataagtagtagcctggtagccaggttgtaatcccacttctaaaatctctaacaaaatagcaaagtcactatgcaagaaggatatgaattatctgtttcctagtcacattctaattgtgatcagctaccattattgcgttaatatacattgaataaagatattttataacatcagttctcacaaccagggctagactgacattgtaggcatcctaaattgattattgagggccacttcatgctgatttaaagtattaaactgtttaatttgatttatttaatttagtatttttggttttatttaatattttgattcaaatattttgaatatttccttaggagagtttaaggtaaaccaactttctattaattttgttctcataattggaaatataatacttggacagaatgcagtacaacattttaaattatttgagattgtatttattgcaaaaattttccattactgattatcatatagcatcagtcactcacacttactgaagatagagatcatgttttaatgttctttcccaccatcttgccacttctccaccccaaatttttttttttttttttgagacagagtctcgctctgtcacccaggctggagtgcagtggcataatctccgctcactgcaagctccacctcccaggttcacgtcattctcctgcctcagcctccccagtagctgggactacaggcacccaccaccatgcccagctaattttttgtatttttagtagagatggggtttcactgtgttagccaggatggtctcgatctcctgacctcatgatccgcccccatcggcctcccaaagtgctgggattacaggcatgaaccactgcacccaggctctccaccccaaatttcaacatattattccattttttgtcttcatttttttgtgtgtgattttcagaactaaataacttctttggataccaagtaaatggtttctatttatagatagaactttacatcacctgttctggtaatctgccctgtggctgccaacttcaggcaagtgtggctttgtaggtcccagggatcgagccctgcagttgcaccacataacctacacatgtctgtgacaaaacttttcaataaagtcaggctagtccagatgatgactgtgttttatttccactctggggtgctatctttttcagggaaatcagggctaattgaccttttgccagttatataaaaagtctcatgtggaaacctgagttagctggccccgttttccaatgatattttagtacattttacagttggcttccaaggcagcaacacagttagacttaccccacagacatagcatgattcagctcacaacaatcatagttatcaagttaacattccgaatagtacttccttctgaaggcaagaaaactccgctgtggcaactgccgagtgcagaagctatttgttaatgatgcccaagctaataggctatggtattatatctgtcatatactaatcagcagaggcttcacaatttcttagagccttgaaaaataagactatttcttttcagtctggtcagattttaatgaaaccagtcaataatccacatacttttttttcctatgtgaatagatgaatataaagaaagttttttttctacaaaaaatttttgtcggtgtagatgaacaggaaagacagagattccagtttctacttgaagcaaaattgttaatcatagtaaagggcaatgtgtaactcttccttttgaagattttcctacagtatcagtgtaaagtagttcgtacttagctcctgaagcactttcctgctttcccggtgagatgcttttctttgaaatgttcagttatctctaccatccacgttctgcttttacttactgctctgtggataaatgcgttttaatctaatgcatggcctttcctaacagtatttgtagttctccttgtaaagttaatgactttcctaatggtaaatacatgtttgctgtacgataaagcgggagatccatcagggcagagagctgaatggccctgatgatctagtgtaggaattgctttggcacacacagtcctatgtaacagtttatcagatgtgcctagcacattttcacagtaacctccaggggggacattgggtcagctaatcaaagtcccacatttgttccctgacctgtgaagtgagggctattatggtgggaaaaggcaagggggagccgctagaactgtgtctacctaggaagatagtaaactaagagcaatgccacattcctggggcattatagaaattggtaccaccatgaaggacttgaaagatgcagaggtggtgattccccctgcatcccctttcaattcacctctttggcctgtgcaaagcacaaatggatgttagagactgatagtaccatcagctcgaccaggtggtaactccaattgcagctgctgaaacatatggtttcattgcttgtggaaactgatacatcaatttatacctggtatgcagctattgatgtggcaaatgccttataagaataatcaggagttttcttctagctgaccagcaataaaccttcactgtcatacctcagggatatattaactctctagccctatgttataatttagattgtaggggttttgactgctttttccttctacatcacactggtccattatatttatgtaataacattatgctgattggaactagtgagaaatatataacaactactctacacttattggtaagaaatttgtgtgtcagagagtggcaaataaatttgacaaaaattcaagaggcagggaaattctgagggtccagtggtgtggggcatgtggagatatcccctctaaggtcaaggataatttgttcttatccttatcatatcctggccttatcttatcctggcctctcctgcaaccaaaaaggaggcacaatgcctagtggcccttttttgattttagaggaatatatttctcatttgggtgtgaaactctgacctatttacccaataacctcaatagctgctggttttgagctggggccagaacaagagaaggctctacagcaggtccaggttgctatgcaggctgctctgccacttgggctataagatccaacagatccaatggtactcacagtaccagtagcagacagggattttgtttggagtatttggaagacccctacaggttaattttcgtgcaggcccttaggattttgaagccgtgctcagccatcctctgcagataactacactccttttgagaaatagctcttggactgctactgggccttcgtacagactgaccacttaaccatggatcaccaagttaccatgtgccctacctgaacagctcattatgaactggatgttatctggcttgccaagccatcaagttgagtatgcacagcacacctcattatcaaacggaagtgatatttatatgattaggcttgagtagaccctgaaggcacagtaatttacaggaagaagtgattccaatgtccgtgttccccactcctactacactgtcttctcgctcagcttgcacccatggcctcaaggagcgtcctctgcaattgacagaggaagagagagtttgggcttagttaacagatggttctgcatgataggcaggcaccaacgaaaggcagttgcattacagcctcttactgggacatacttggaacataatgggggagtgaaattcttctagtgggcaaaacttcaagcagggaacctggttgtttactttgcttggaaggataaatgaccagacatatgattatatagcaattcataggctgtagccaatagccatgatgatcaggcaactggaaaaaacatggttagaaaattggtgacaaggaaattcggggaagagatatagataaacctctctgaatgggcaaaaactgtcaagatatttgtattccatgtgaatgcctaccaaagggtgacttcagccaagggagatttgaataatcaagggtacagaatgacttgttctatagataccagtcagcctctttccccagctactcttcttatcacccagtgggcttctgagcaaagtgaccatggtggtgagaatggaagttatgcatgagctcagcaaaatgggcttccactcttcaagggtgcctggccacctccactgttgaatgcccaatctgtcgtcagtggaggccaatgctgaattctctatgcaaccattttctggtggaaggttgattccactgagctacttccatcatagaaggggcagcattttattcttaccggaatagacgctctggacatagatttgccttcctgtcatgcagtgcttttggcaaaactctcttctgtggatttacagaatgccttgtgcagcaaagggcccatgctcgtgaaattcactggtcttaccaggtttattcttatcctgaagcaaatgcttgatagaaaagtggaacggcctttaggagactctcttacagtaacagttatgtggcaataccttgcagggctggaacaaggttctacataggattatacgttctgcatcaatgtccaatagaggagttatttctccatagccaggacttacaggtctaggaatcaagggtggaaatgggaatggcaccactcaaaattatccttagtgactgaccagcaaactttgtttctgtttcccttggtcttatgctctgctggcctagaggttttattcccaaaagaaagaatgcttccatcagaagacataataatgattccattgaactggaaattaagatggttacctgaccaatttgggattcttatgcttctga

SEQ ID NO: 110 - DNA, 118422 bp, Homo sapiens
agaaaagctacatacgtctctcgtttcttcactaattgttctctagaaaagggaaagtgaagaagggaaagagaaaagacaacggggaagaaaagagcatagaggagagaggaaaagtggggagagaaaggaagaaaaggactgagaaaacgcaggagccctggcttgccggtgagcagagccggcgcagccacagcgcggagccgcggcgcccactggtcctcggagctgccaatcggcgtgtaatcctgtaggaatttctcccgggtttatctgggagtcacactgccgcctcctctccccagtcgcccaggggagcccggagaagcaggctcaggagggagggagccagaggaaaagaagaggaggagaaggaggaggacccggggagggaggcgcggcgcgggaggaggaggggcgcagccgcggagccagtggccccgcttggacgcgctgctctccagatacccccggagctccagccgcgcggatcgcgcgctcccgccgctctgcccctaaacttctgccgtagctccctttcaagccagcgaatttattccttaaaaccagaaactgaacctcggcacgggaaaggagtccgcggaggagcaaaaccacagcagagcaagaagagcttcagagagcagccttcccggagcaccaactccgtgtcgggagtgcagaaaccaacaagtgagagggcgccgcgttcccggggcgcagctgcgggcggcgggagcaggcgcaggaggaggaagcgagcgcccccgagccccgagcccgagtccccgagcctgagccgcaatcgctgcggtactctgctccggattcgtgtgcgcgggctgcgccgagcgctgggcaggaggcttcgttttgccctggttgcaagcagcggctgggagcagccggtccctggggaatatgcggcgcgcgtggatcctgctcaccttgggcttggtggcctgcgtgtcggcggagtcggtgagtgggccaggcggaggatgcgcgcgccgtttagggtgtttgaagctacgagaggagcccgcagggaataggggagcgccacctggggaacccccagtccccaagtatacaccggagatccgctgggacaaatgcgctcgtccggtcaccctttccccctcttcccttcctcagaaaagcgctgctcgctggcgttaccccgcggtccgcgggaatgggggcaccgagaattgcggtttggtctagccgcagaggcccctgaagtcactcccaacttcttcgccctcggcgggtcttgctgcgtggtctgggaaggacggaggggaaagggtggcaggaggggggagcctgggtcgggcccgcgagggaacggctccactccgcgcgctcctcgagaccagggatgacctggaaacttcggggtcccttcctccgcacaccatcccccccgcgccagctttcctgtttgactgcatgcaagttctggggagatgggggccagatttaagagacccgcgagtgtccagagagaaaagtttgcaaaagttcttttgtttgatgctccctgcggctagggcgaggtaaccgacactacgtggaatcgcagtaggcgatccctcaaggggatactgggggaggcacggaacgcgtccgaaaatgctgggacgccggccactggattcccagtcctgcggcgaccccctcctcgttgaggggtggaggttgcaccgcggggcgtcagggacgggaggacattttcataggagttacacgggagtgccgcaagcagggcgaggcggggtacgtgtgacacggcgctcggcttcgggtcgcctggccgctgggggacagaggcttccctcccgccacgctcgccctctctggccctggcggggcgcttctggggccgggaggagtctcgtctccggcggagcgcctgccggcacccagcttccctcccccgccctggcggtgggaacttgatttctccttttggtcgcgcttcgggggctggagcttgtttccccacgtcgcccaatgagcgccctctaaagggaactgcctccttggcctcctctcgtccgcagctgcctccacctgggcgccaggagctctgtcgggccaggtggaagcttgagcaccccagatttcgtctgcagcctcagtgccctctggggtctcagggagtgcggctgtttctggcccttctggttccccacgtcctctccctttgccatttaataacgtgtcaatttctaattaattgaatggtcttttcaaagacaaattatatcatcttaaggtcttttaggtagttttatgagtttgagtctccctcccccccttttttgtgctgaggctaatttaggactgggaaacctctttggcatcgagcggcagatggacatttttaatcagtgtgggagcctctgtgtgtgctagcagatccccatacgttctttgtggttggagagcatgtagaattggaaactgtacagactacatgagtattttgggtgctcaggttgtaaaatagaactcccagccttatcagtgtttccctttggcaaatgatggtttaatccgttggtattagttatctcccagccagttaggatgaactttggctctttgtacaccaaaaggcagcagttctcttgtttatttcagatgagcgttgttgctcctcttgttgcaaaacagggcaaagggacttcatctaataaatttcaagagcctgcctaaaaaactgcacatggttaaggaggccctttttttttgctgagtcttattcatggatttgctaggaaatgttactgttttgggattctggagaaagaatgtttctgtcttctgctcctctgggtttttgcataaatctaccagtgctccttaaggaagttttttggccgaactatatacctgtcctccccggtgacagctttcccctgaactgtgtatctttggggttctaatatttctcaatttgaaccagaactggatgctttccgagtgaactgcttcattgtgatagacactgttttcagtaattggaaaatcatccaaaaagggtgattagatatttataaaatgtcaacttagagactagcagagaatctttgttaggcagtgagtcagtctttctaaatagaagctgtttcaaggcccagaatggctaacagtccatttaaattacttttcagtctccgtttgtttcatgtatagcagcaaaaatataaatgaagtcaaaagactgaatttaaaaaaaaattagcaattacagaatattatttccaggactttgcattttaatttgaaaactgcaactgtttcctgggatttagaagtagtgatttgggtttaaagtctccctttaaaggaagaaaggaaaactgcctacagttagtgaattcttaagttttatacttagctctgggggtaaaaaagaggttctcaggaactaaggctcaaaactgcctatgaaaaggaactggtagctgttcctttatggatcctggaggcagctgggaaagcctgttcctagtgatccattcatactttccactggcaggttaggactttggctgcggagcaccaggcaaggggaaaatctgactgagtgtggcagtagtgatatgctgctggttttctgtccattttgtacatgactgtttatctttagaaataatatattgcagactgctataaacacataatttgaactggaaatatgtttaagaaaaggaagtgttttgaactagaggaattttataaacattcttagatgtctgtaaattaaaagaaactgtcaagtcatttgggcccatgcattatctctcggtgtattatgaaaggcaggctctggaaagtttgcattagaagggtaactaaaatcgaaatcatgtaactttgcagttctttagaaaatatagtttggctgttttatgagtgaaacaaattgcttttgctagggaattttataaaaacaagggctctttctctcttagttgggtattagcagaaggaggatgtcatttaagaaggaaagatcttgaaagatcaggcttgcagaaaatggatgtctgagaagcaatttgagcatgcccttcagcttctgcttttaggacctgatatgtctagttttgatggtaaccacccttcgaggggtagcctaccctgtgtaatatgatcacttaaatggcgccttggataatcattagtttggaaaggatttcaaaaggtgaactggtttgttccctgggtggaactagttttcaagtctccaaaagcccccagagacctgactggccagctagaggtggcttggagtctccttaggttggcaaggcccctgaagctgacccagtcacacagagccccaccagccctgtcattaaggtttatagcaagtccagtcaagccactgtgctgttggcatacctgctggtggggatccagttgtcctgtgaggaatgccatctgggtttagattctcactagattgtccttcttccattgccaaaaatcaaactaaaagattttgcccatccttttcttcttcccaaggcagaagggtgcattgcagaatctccaaaccactgaattcttttcgtggactagaggccaaaataaagtcttagagaaaagccagaagtaatgaagaagaatctttgctaaaaccaatctactcttatttaacttttttagtcaactgtgacagtactatcattttcattctaatcatttggatttaaatcttgaagaagccctggactcattcatctttgttggtttccacgtccagtctgcctctaagtccagctgtgcattcattctgcagatatttatttcatacctactaggtgcttgaggtaaagcagtgagcaaaccaggcagatatccccctgccttcttggagcttgcattctagtgatctttccgttcattttttcatgccttcagtggccagcgtggaacttcctcaggagtgccaaccggccccagaatgccctggcccatgggaacctgcacttaaagatgcagcaccaacaggtgtttacccagctcctgacctgagctcagcactgcaaagaagtcggggtttggaaatgtggtcccttcctgcagcgctaatcttttttttttttcctcttgagatggagtctcactctgtcacccaggctggagtacaatggcactctgcaaccaccacctcactgcagccacctcactgcaaccaccacctcccaggttcaagcgattctcctgcctcagcctcccgagtagctgggactacaggcacatgccactgcacctggctaaattttgtatttttagtagggatggggtttcaacgtgttggccaggctggtctccaactcctgacctcagctgatccaccgcctcggccacccaaagtgctgggattatagacgtgagccactatgcctggccattggtctcttcctgcagcactaatcttgatgggacagaaaatttcaaatgaagagctttccctctttttttcttccttgggggcatgccagcttgtgcttctatgtcagtagccttgtagttgccattcctggcccagacacttgcatgcagtttggtttgtcctccaccactttgatcatgttgcccatggtctagacacctccgtgtccttgttatcatggcatatagtctgtatgcctctgctggatttataagcggccccataatagccttcctttctggttacccccttgatcactttccaccacatctcccagccctggcccattgatatcactatcatgaacactccctggacattgctactttttcagtgtttctccttttaaatgctattgattaaatgcaagctccaaataccttttcatggctgatccagccctgttgtttttaatccttctgtaaatagcaaggcatactgatgatcagaatcattgaaagtatgtgaaaatacagatttcaggcctcctctcagacttacacaatcagaaacctgaatgggggtgggagtgtgggggaaactgtatttttataaagcgactgagatgattctaatgaatcagactaatttgggaatcgctggtctagatcacagcattaccccttaattatgtgctattctatgttactactagagttttcagcagtagctgggcttagaatacaaagggcttgggcttgggaggtggacaagtctgggttcagatgctggtaccttgccacttaatgtgtcagaacttggacagtatattaaagctctgagtcacttaaaaaagtgtgtgtgtgtaaattggacctaagaatgcctttataacatgactgttgtgaagatgaaatgaagggagcatatgaatggtgcttgaggcacggaagataggacatttttttttcttcctttcctctcttggcctttttttttttggcaatgaaatgaatgaaatgagggagccatgtcagatgttcttacctctctgacattctaaataggtgaattttctctcccatcaaggttagtgctataggaagaaaccatgtttccaaatctcctactcctgtgcagtgctgagctgggtaaacatctgttgacactgcatgctgaagtgcagatacccgtgggcctggacattttggggttggttggcactcctgaagaagtttcacgctggccactgaaggcattatggttcagggtcaactgaatacaccagcccccagtggacctgggctagttgtccagttttgatgcctctgcactcagtgtcatcagcattgcagggttggtgtcaagaataaagaagacattgatgtaacgtcttgacacatcagctgtgcacagtcacacctcctcctcttccctgaggctgtgctgagattccagcacatgggaaggagagagttagaatttagtctgtatcatgcgttggtatgccgttggtcatttagaatgaggtggcaggggtagtgagtatattttggggatctgggggcagaaaagggattatttttattttttaagtgtggaaatgtggcctggcgcgatatctcatgcctgtaatcccagcactttgggaggccgaggtgggccaatcacctgaggtcaggaattcgagaccagcctggccaacatggtgaaaccccgtctctactaaaaatataaaaattagccgggcgtggtgatgggcacctataatcccagctacttgggaggctgaggcaggagaattgcttgaacacaggagacggaggttgcaatgagccgagatcatgccatggcactgcagcctgggcgacagagtgagactccatctcaaaaaaaaaaaaaaaaaaaagagtggaaatgcattaaatttcttcttttagccattgggctttaggtcttactattaaaaatctcaactgcattttgataagtctgtttctaggcagcattagctttagcaacaaggatggaggggtgaatgcctctgaatgggagaggacactgttgaaatagaattgtgaatgtctgtttttctcaagtatctcaaagaattggtaggagtgggagaagagagaagccttgaaatctttggagattttccatttgcatttcacatcagcagagtgaagccaatgagtatgcagctggtggcgtgatagccaatgcatagtcttggaaaaatggaaaaatgttattaaagacatgttttcacagtttttttctctactattcagtctattttgtgaaaaatgtcacaaagactcagtaagtatgctctctacaaagcattttggtgtttttttttatgattacacaggtatattaaatacaagtaaccgtgatgtttaaggagtgtgtgcaattaatagaatttagtctcatggtataagaatgacacacgggacaagatacgcaattattaaaggaaaattttttttaagggaaaagttaaatacgtatttctttttttttttttttttttttttttttttgagacagagtctcactccgtcgcccaggctggagtgcagtggcataaatgaggctcactgcaacctcctccccccgttcaagtgaatctcctgcctcaacctcccgagtagctgggattacagtgcacaccaccacgcctggctattctttttttgtatttttagtagagacgggatttcaccatgttggccaggctggtcttgaactcttgacctcaactgatccgcctgcctcagcctcccaaagtgctgggattgcagacgtgagccactgcaaccagctgagttaagtatgtatttatgtgtaatttgttattaaatataaatacagtagactaaatatacaacattttaagtcaaggcaaaagcaaggttttatacacatgtaattaactgtcttaatccctgtgagacctcagttttctcatctctaaaatgatggagttgaacgagaaaaactctctctccttaatatttactttttctgcactttagggtgtggtaggagaaatgtgaagattaacttaataagtaattattaatcccctgtcaaatacttctaattttattattgaaacatggaatttattcaccttacagaaaggcaagtaatttctaatagctcatggtaacctgttaccttgaactgagtgttcattgtttactaggagtggtatacattgtcctgcgtattcgtgatctaatgtctatttgtattagtctgttctcactctgctaataaagacatacccaagactaggtaatttataaaggaaagatgtttgatggactcacagttccacatggctggggagacctcacaatcatggtggaaggcaaaggagaagcaaaggcacgtcctacatggtggcaggcaagagagcttgtacaggggaactcccatttatgaaaccaccagatcttgtgagacttactaccacaagaaaagtataggggaaaccgcccccatgtttcagttatctccacctggccccgcccttgaaatatggggattattacagttcaaggtgagatttgggtgaacacacagccaaaccatatcactagtatttttttatatattttctgatacaagccagtgtaacataaagaacagctgcgtggtaaaaataactttcattctagatagaagactacatgacttgatatactgggggtctttttaaactataaatctcataaagtgttttagtctcctcatatggtttctggcctggatctccatttccagagtggggcttttaactggtgccttccgtttggtccctctctagagcacttgagcctggtctgagtactgtgcagaccacaagcaagaatctaaatgagcagactatggtagtgttgcctgggtttggatacacttattatgtaaccttgggcaagttttttaaccttctgggctcagttttctcatctgtaaaactgaatatcctaaaataagtttttaggattatgtgagacacaataagtagggactttttagcataagggaatgtccatgcgttgtgtcacatgctagttataattcctggctttctgcttctctgaagaataagggcttggcacacacattagttgggctcatctgataagctctagcccagagggtggctcagcatatgcatgctaaggcctactttttcataacaggggctttcttcttgtcttggggtagactagttctacgctgagatattgggaatatgtttgtagtcagcttttctctaaaagtggatgatgtgagaaaatatgccatttattatttctggctgatgaaaggttccttacagggacaggacaaatccgtgttaagatgtgaaaagctcatctttcccagtaattttacctccacaaatctgtccaaaggaaatcattaccaggtaaatagtatttaatgtctttgttgaagtctcttacttataatagttaaaaaaatggaaacaacccaagtgtacaataatagagtaattgttaaataagattctaatttagacactgaatatcatgtggccattaaagatttatttgaagggtatttataacttagaaactatagtacacaaaaagttagatataaacctatgtatagtgagaccttggttatattttaaaaggtgtgtgtgtgtataaagataatgtatatatacaaatccatacatgtcatagaactgtgtagatacacatacacaaacatacacagcatgaatacaggtaaaactaggaaaatcagaataagattggtagattgtatcaatatcaatatcattgttgtgatgtttactgtagttttataaatgttaccattggcggaaactaggaaggggcacaagagatctttgtattatttcttacactgtgtgtgagtctatagttatctcaacaaaaatttcaatcaaaaaatggcaccagagctagattgttgtttaagtaagttctgctgatccttcagagaaagatatgttataaagctcagagaatgatagaaggctgttctttctcattttaggaggttagcatcactctatgtcaaaaccagacaagaagagcagaaaaaacaaacctataggccaatgtcatctatattagatgtcaaaattttaaatagagtattattaaattgaatacagcagtttattaaaagaataatgatgagcccaattgggatttttccaaggacagtttcaacatcagaaaagcaatgcaggtattaacagtttaagggagataacaatatgatcatctcaacagatgcagaaaaagcatctgaccaaagtacatgtgaaagtattaatataaaggttcccaaattctggttaactgaaggcatattatatttggctagtacatctgtgcttcggactcaattcacttgacatgtttaggaaccaaaaggcctctgtttacaaagttgttaggcaacagtctctagttgcatgagtgacaggtgtgtgacaacccaataaaggatgggccatgacatatatagattctaattcatatggagttgttctagcattgcccaggttcactgtgtactctcccaaattaagaaaatgcaagagatggttttgaatgttttagaatcagataaattggggttcagtttctggtattaccacttaaaagccatgagaagtctcttatcatctccatgcttgtttcttcagtgtgaaactgggattagaatattttgctttttggttattttgaagattagcctcaataatgactaaaatcttctaacacaaagcttgacccatagtaggtgatttaaacctgttggtttctcttttcttccatctttaagttttgtgattctgcagtatattatatgtttatgtataaatatatacgcatatgttttgtgtttctcacttgcatcctgactcttaacactatgggacatatattttcacaaatttagaactggtttttatttttattttgtattttttttgtgtgtgtgagcaacaaggctgtttatttcacctgagtgcaggcaggctgagtccgaaaagagagtcagcgaagggagataggggtggggccgttttataagatttgggtaggtaaaggaaaattacagttaaaggggggctgttctctggcagacaggtgtgggggtcacaaggtgctcagtaggggagcttttgagccaggatgagccaggagaaggaatttcacaagataatgtcatcagttaaagcaggaacaggccattttcacttcttttgtggtggaatgtcatcataaaactggtttatttttagtcacgcaagttatgatgcttaattatattttgtatttcccctgtcacccatatttcctgaataatacttagctaaaacttgcatacaagttggaaatttagttaagactggaaaatctttggtagtacttggattataattaaaatacttaaagaaggtcagcatcggaaccctaattatttttattatttttatttttttttgagacagggtctcgctctgtcgcccaggctggagtgcagtggtgcgatctcggctcactgcagcctctgcctcccaggttcaagccattctcctgcctcagccttctgagtagctgggactacaggtgcaccaccacacgcagctactttttgtatttttagtagagacagggtttcaccatgttggccaggatggtctcaatctcctgacctcgtgatctccctgccttggcctcccaaagtgctgggattacaggcataagccaccgcgcccggcctggaaccctacattttaaacactgttttatataaatttactaatgaattaaaatcttaactttatttatgtcccacttctgaactcgcttaaataagaatggtgttttgatttgattattagatttgattaggtattgtgattatgctgattagttattgaattaagttttgtactcgataaatcagtttaacaatggacacacgttactataagccaacaaaggacaaagctctatgttggtcctgcaagttaaaaagaaattatgacatggtactcaccttcaagtaactactgtctaccttatgattatttagagaattgaaaatgagttgggccagcacttaaaatatgtgttatatgtaaaatatgcatcagtttatgttgaatctagttcggcatttgtacaatcaaaattgccaaaaaaccacaatggagaataagaagaaccccttgtagaagagaagtcactggtctcctggaaaagcaaaactttcctaaaaccttccttgaagtggcacagtatgttggagaaaaaggagaattctgttgatgacttggagacacttgattttcatatgtttctctttttcccaatcttctcttcaaagaaagacttccaagtggtaaaatgtacaaaaggtagaaagagtaagaaattgtttagaacctgaatgatctgttgatatttctatcaggggagaaagtaaccttatatttcaaccagtcttgattctccatattctataatctttggggtcttaaaagtgagagctgggcctttgtatatatcatatgtaatcgggtaaaaagtatacatttataatatatacttatatattatacacatcatatattatatacattacatatatgtatccggtgaaaacttataagagacggagtctcattctgttgcccaggctgcagtgcagtggtgtgattatggctcactgcaacctcgatctcctgggctcaaggcattttactacctcagcctcctgagtagctaggactacaggcaccagtcctggctgagtttttgttgttgttgttcacatggggtttcactatgtggcccaggctgtggaccttatagtaggtgttcagttagatcaaatagccttagctggccgggcacggtggctcacgcctgtaatcccagcactttgggaggctgaggtaggtggatcatgaggtcaggagatccagaccatcctggataacaaaatgaaactgtctctactaaaaatacaaaaaattagctgggtgtggtggcgggcgcctgtagtcccagctactcgggaggctgaggtgggagtatggcgtgaacccgagaggtggagattgcggtgagccgagatcacgccaccgcactccagcctgggcaacagagcgagactctgtctcaggaaaaaaaaaaaaaaaaaaaagatagctaagtaatcaaagaggtataaaagtgttgggataattctcactgtattcttttggattttgcttttttagtttttgtaacaacggattttagagctggaatggacttttaaaaggaaacacatccagagaggttaagtgatttatccaagattacctaggtaattagtggcagagttgtaaatttagcctacgctgttttattagtgtattttcttataaaacattccttttctggctgcttctactccctcattccccacattaatgattagcacctaatgcacttatttctggcacatgtttgacaaataaatgaaataccatgaaacatacattttacgttatacatttagcatcagtgtggttagtgggttttgtgcagaatcctttggtgtttagatactttttctatttccagcaaaactgtgctccaactaattcctttacttgctggtgaaacttcaggctaattatgggaagacagttgagaggactgagatttggaagacccagagactgaaatagagttgatttgtaagtcttaggaagattgtggagatttatagatagaaaaggagataaaagcttcctggagataagaatcgggaccagaagcaaaatcctcatgaattaatactgcattttctgggggaaagaaggctgctattgtagttaagagaaaacgaacattccttggatttttatgctaaaaatatgtcagtgccttccaggagagagtctgatgcacttacagcccaggtagaagtgcttttttacccaattccttttgccaatcttagatgtaggctcctcttttctcccaagagtttcctcttgaatattggccggctgtggtggctcacgcctgtaatcccagcactttgggaggcagaggcgggtggatcacgaggtcaggagttcaagaccagcctggccaacatggtgaaaccctgtctctactaaaaatacaaaaataggccaggcgcggtggctcatgcctgtaatcccagcactttgggaggccgaggcgggtggatcacgaggccaggagatcaagaccatcttggctaacacagtgaaacgccatctctactaaaaatacaaaaaattagccgggcatgggggcgggcgcctgtggtcccagctacttgggaggttgaggcaggagaatggcatgaacccgggaggcggagcttgcagtgagcagagatcgcgccactgcactccagcctgggcaacagagtgagactccgtctcaaataataataataataataataataataataataataataataataattagccgggtgtggtcgcgggcacctgtactcccagctcctcaggaggctgaggcggcagaatggctttaacacaggaggcggaggtcgcagtgagcagagattgagccactgcactccagcctgggtgacagagcaagactccatctcaaaaaaaagaaaaaaaaagattattggtttataaattttatcataacacaaatgtatttgagtcaagctttttcagaaaaataagtctgtgagatatttttaaggaaagaattttattaaaaggcagtaacattaaaaattaccattaccacagccttctcctactatagataggcattttccattcattgtctataactgtctcacaactgctaggcggtattacttgccaaggctgcattttatgtggcccagcacaagttagagcctcagtttttctagctttaaatagtctttctatgatactgtaatctttcaagagagcagtgaaagtgtctaactgtatcaccaactgtttaatgtagtccaatgggtacaaccctggatcatgaagtgtctaatggttgcagcctcaaatcatgaagtatctaatggatggttgcagccccgaatcatgaagtgtcagaatcttccttttcattggttggcctaatcttccaggtcactgatattctgatttctttaccaacttttagcatattgctttaatggcttctctctgcaaacttcagtctggtaatgggagaactaagaggtagaattaatggaacctctctaaatctcagctctgccaatttctggacttgggcaggtgatttaacctctctatgcttccattttcacatctgtataaaggagattagtcatagtagccacctcatagaggtgttgtgagggctaatgccttaattaatgggtgtcaagcagtaataagagtgcgcaggatagagcctgcgctagactctcagtgttgatgatgattgaaatggacagctaattggatgtactgaccaaagaagacagtgtcaatagtcttttgaggttttgaacatgaggcagagaagactgatggtgccactgaccagatcaggaggacagaccgatttttttcctcttctttttgtggctcttgtgttttggtgaaaggaggaggcattttggtttctctaggttttccatctgggtagtggagggcatattctccatcacgggttttcagcccttgctgccgattacataaacttggggagcttttaaaaactattcatgccttggccccactccagacaattaaatcaaaatctatgtggttggggtccagctccctgtgaaagcttattctcacttccagaaggcttgagaaccttgctctagaggacttcttagtctccagtttagagagcagcctagcaggtaagattttgtattcttaacgtatgctttctactgctgtgattaagccccatgtaatgaggtggctttccaggactcatctgctgcctgtcacagtctaagcagtgtggaattgggaaatccttgctcccttccagctttttccttttctccagtgtcttttctgctggatcatacttttttcttttgactattattttggtggatttggaaacattcgagaggtctttagacagaagactgcatagctataaagtaagtttatctgaggatgtcttttaaaaaaatgcacacattgcccttcctgaaggaaaacttttcctagtggagcaagggacactcgtcctcttggtctggttacagaaaagcatgtttggccagcttattagatttgcctgagttcatactttgaacagaaaaattgcatgttttactgattggaaatacattctgggacttgattgaatatactgatcatgtataggtcctacataggtgtcttaataatggtcttcttaccgtacctgcacttaagttcagcaatttggacctggttcaagtcgcttcaattccatggagctgtattgtttgcagctgaaataggaagagagagtgctttaggctgtcttgtgagcaagacatctgagttgtctttagttcatgcttaagcacaaaagcagcagcccatcatctaatctattcatagtttactttgttcgggtatctaatttgggagcatgcttgccctcactcacttctaaaacacacaatttgaataaaagggtctatctttaattgactcagggaacaaaaccttgttgaagaattctggatttctcaaagcttttaaaaattgctctgcaggataacattacaatgctgaccctactgccactcaacatgtatctgtcctacaatggagttggaggagggattattctgagaaggctattaaaatgaaccatttactatgattcataggcttttaaacccagtaagtctgtaatatctagagtaaaattcaacatcagtttattattttggtgatgatggggttaaagtgtctttacaaagtattaagcatgcacagagaaaatgcaaatgtgaattctcttcgttctccccgttaggagtgtatgcctgatagataaatgttccagagcattcatgtaatacaattagtagatataagtgctttttctcagtggaaattgaggtctgttacaaggagtaacagattaggccagtggttctcgaagtagggactaatcagcagcatctacagctcctcggaccttgttagaaatggagattctgggcctctctgcagactaagcaatcagaaactttgcaggtagggcccagcagtcttgagctttaaaaagcccttcaggggatccttctgcatgctaacgttcgagaacctctgagctacggttctcaccttgacagcacagacactattgagagtccctggttgtggggcacgggtgtcagtatttttgtttcttaagctgccttggtgattccagtgttcagtcaggattagaggctgctgctctaggaccttgctacccaaaatgagggtcccagaccagcagtgtgggcatcacctgggagctctttagaaatccaggctatcaaaccccacctgagacttactgaatcgtatttaagtttaacaagattcccagtgactcataagcacattaaagtttgtgaaacactgatttatagaaatagtgagtttcctttgtagaagccagcccttagaacgcccttaatttaaaagttttgtgaggaggtagaacagctgttttggcttctgcctggcagtgactcagggaagcaatcactgggggcaaggcaaggctccgaaagctgtgaaggacccaggaccatttcatcgagtgagtgctggtgcaagtaatgaaaatcccaactcagattggcttaagcaatggaaactttttggttcagataatggaagagttcaggagtagttctgttttcagatctggctgcatcaagaggcttatgtgattttttttttttttttttaatcagcctcaaggcttacgtaactctcagctcaaccttactttgttagattcactttcaggttttacagaattagagtaacagctaagctgttgttaaaaagagattcctaaacatagtggcttaaagtagatttatttctgtttgacacaacagtcccaagacaggtctggtgggatagctctgctgtgctcacacgcagttcttacctgctggtccaaggtggccagtccatccatactgtctcccagccaggagacagagtcaagggggagaacatacccattccttttaatgccacagcctggaggggtaacatgtcacttacacttatatcccactatttgcagcatagtcacgtggtcacacaaggtactatgcgggctgggaaatgtagtctctacatgggtggccacgtgcccaactaaaatctggggatgttttgttactaaaaagggaagactttaggtattgatgacaaccaggagcgacttctcctctggtggtggcaagatggagtctggcaacttcaagttaacagcctgtcctgtcagcagtttcagtagaaagcactactctttcctagttcttccagtaagaatcccagaatagcttcctagttccttaatttctgggaactacacatgaagaagtgtccccagaatcccgtggactgtgatagaaaaggattggttcccccaaagagaactgtttaatagcaggcttagaacagagagacctttacctcactcctttgtgaattggcatttagacccagacaagaaaggaaagtggagaacatgggggtgctcaagccagatgtgggggcattgggggctatttactgtcgagttagtcaagcatggaatatttgaagattattagcacgtgacataaagggtatttaggaataaatgtgtttgctgagtttaataaacataggagactgtaacagtgtacttttgatcttctgatctcttattttagtggttggtaaataagagtaaaagaaaatataaactttgacaaatgcttttaagaatgttttaaattatttaatctttaattgctaaagattatgtaaatagaagcctttagtgcatcaaacgatgagtgttggagagatgatgaattgaacttgtgtttaccgtctccttctcaaggttttgttttcttagtatgttttttatactttatacttagtacttttttatactttattcattacacaaaggatttgaggtaatttccaagactaaggcctttctcgcaagctttagaagaaaattctaaaagcatactacatcctgcttttaaaaaaagttgtgacagtcttacatgatagaaaaataatatatcatattcaaaataacatggtatttccaaggttctcaactgcttattgtccttttaatgaaaatgtggattgtaggcacatctgctataaatgaattaaaatttcatttgcccagaactttgtgtattccattaataagatttacccaaaacactattgttggtttaataaatattaagagagtctttgggatgtgcctcctggcgtttgttgtttctctcctttgagcattaactacccttctgagccttcacaggctgcttttgttgttttgtgccttgagatataaatagaggcagaaaacccagaagatgcaaacagatttaatactataaactatttacagatgtgtttagtattcattcaatagaaccttttagtttattgaatataaaccagctttagcattctacatgtgccaggggttctgttttttcttttattggaaattttaaaaacgacaaaaacatcttttggtagtatcatcatctaataagcatgagaaagatgtaacgtcatgacttgcacctgaccctttgtcttcttggatcttacatacttttggacaaccaagagtgaaaagggtggaaacttccgatctcgactgagtaaaaggaaagcctttctaagaggcagtcaaagatggaacaggctacttaagcaggaggcaggacccatacctggagctaagctggtgtttgtttggatggctgtttactgaggatctttagaggagattcaagccatcaactggctggggagagtcgctgacctttatagcttccttctaaccttagaagattctgtacgacattttaaaggtgagtgctgagcaacttaaactatattttatttcctttcctgataacttggtctgactgagactagacatcttttgttgcctatagttgaaggagtctggcattctaggaccaacttgctgttaaactgatggcaagatctctatttgccaaagttaggggactgtgtatgtaaccattgaaatctaacattacctcaaacttcaagggactctgacaggtactttaaccagttagaatggcacacttgactatctggtttgagtcagagcagtgagtgcctgggagaaaacagcaaactcaagacaccatgagtggactttagggagagggaagagagacagagggcccacaggccagcacgaagaatgtaaagggaaagtagccactgtcccaacctgccaggggtttgggaggcactgttaatttcccaagcattcacttatccgcactttgaccaggcaacccttcttcggctggacagggacactcatgctggaccttgatcacccatgacccatgtgtcatagtgcagagctttccttctgaggcttaagtgaccagtgtgacaagaaccctgaaacacctaatgtacagaaggactctaggtccatggtccccaacctttctggcaccagggactggtttcatgggagacagtttttccacaggtgttaggggggatggttttgggatgaaactgttccatcttggatcatcaggcatcagactcctttcacaaggagtgtgcaaactagattcctcgcctgtgtaattcacaggggtttgcattcctaggggaatctaatgctgccactgatctgacaggaggcggagtgcaggcggtaatgagattggatggctactcacctgctgtggggctgggttcctaacaggccatggaccagtactggtctgtggccccgggggtcggggaatccctgctctagtcatgaaccatttgtctccctcttgatttttcctgtgctagcgctcacttccatgtttccttctttattctgggtaaagcaagagaatgctggacaggtagccagaagacttgggttcttataggctggcctttctctgccagttaccagctgtgacctctggcaaatcactcaacctcttttacctcagtttccctttttgtaaaaccagctagtctctgcagtcaaaccttcaatagttctataatggctatgcttttcttaaggagtcgctttttccccctactttctacttactgccttgcaatgaagtttttaaaattccagtccagactttaacactgtgttctattctcctctcttctcctttggcagccaactaaattggttacagttgtcatttagaatgcggtaatctttcatgactaaccatttcctctcttagagatgccacttcatctagctgctgtagctcggatttcttcctcacagataagaggatggaggttgctcttgatatgggaaatagaaggatggaggttgctcttgatatgggaaatagaagtcggagtaggaggtaaagttccactgtagagggaaaatgtccacctgttagagacaggaaacaactggggtgcgaagggccagctgtccgtgttctgtggatgaaaattcccagcagattttttctgtatttttggctctgaatattatacactgaacatagagtcttgtcctggaatctgatagttttcttaaacactggacaagtgaatatactccaaaaagatcatgaggccacgggtattgtattctgaggtcccgagaagttgatgaatcttctctcccaaaggcggatatttttaccagtgtgagctacccagaaaattttaaatttgaaaatctcccaaatgcccatgattttgatggcaagaattattagaggcaggtggaaaatactgcccaactgtgatcatgacactttcaccaacttacggctccctagccctgggactggccaaagaacccagtgttgggctggaaggggagcccttccaggctgatggatctctttgccccaagtactgttgtcacactgccggtgttcgaatcaccttggggattggggttatttgttaaaaatgcacattcttgcatcccatctcagaccctgcatttgaatgtagctgaaacatactgaagttacagaatcattgcttttggctgaaaacctagaaagcttgcaatggctttctgtggaccccacctctctgcttaacctttttgggtttttagttcgggatctaaggccctcccctctctaaaatgcaaaatgtgacactgagctaaagatcaaaacatagcaagcgttatctagaaattattcctttaaaaatagtttatttagccatgcaataggataactgtcaaacaatattttatgctacttagagttgtacatataggtacataacattgaatagctttgttgaagtataatgtacctgccacaaaaattcacccatttaaagcgtagtttttagtgtattcacacaattgtgcaacagtgaccacaatctaacttgagaatattttaatcacccccccacctcaaaaaaaaaaacctgtacccatttgcagtcacttttcattccactcacttcaaggcctaggcaaccactagtctcccttctgtctctgtagatttgcctattgtggacattttatgtaagtggaatcatgtaatatatggccttttgtgattaacttctttcagttagcatgttttcaaggttcattcatgttgtagcactagtacttcatctctctttattgccaaataaatatttattgtgcattgcatatagtcatacccccttttccatttgttagttggtggacatttgggttgtttcaaccttttggctattaggagtaatgccgccataagcatttgtgtccaagtgtacaagtttcatggggctatatgttcatatatttccatttctcctgagtatatatacctacgagtggaatttctgggtgatatggtaactctgtataacatttcaagaaactgccacactgttttgcaaggtagctgtaccattttacattcccaccagcagtgcacagggttccagtttttccacatcctcatcaatatttattattgtctgtccttttgattacaatccctattgggtatgaagtggtatcttattgtggttctggttttcattttcttactgactgatgatgttgagcaagatgtgtttttgtgttcttagccatttgtatttactctgtgaagaaatgtctattcagatgtctattctgtgggttgtcttttcattctcttaatagtgtcctttgaagcacacaagttttagatgtttatgaagtcaaacttatcagtttttttcttttgttgcttatgtttttggtatcatatataagaaacactgcctaactgaaaattggaaacatctattcctattttcttccaagagttttatggttttagttcttacatttagatctaaaatctattttgaattagtttttgcatatgttgtggggttggggtacagtttattttcttctttatgcatgtggtatccagttgtcccaacactttcttagaaagtcttattctttccccgttgaattcttggcacacttgttgaaaatatattgaccataaatgtaggggtttatttctgcactctcaattctgttccttttatctgtatgatttatatgaagtactatatgtacatatttttgtatgtatatatgtgtgtgcataaatacacacgtttgtgtgtgtgcatgtgtgtgtgtgtgtgtgtgtgtgtgtgtgtatatatatatgcacacatgaatcttaaaattgtttttcctgtggccttaatttaggtgattagggaaatggacaagtcaataggtaggaattaaagacgttaactacaccaggagacttgaccatgaagtccctcctgcctcagctgagctaatttaacagggatacaaagagccgcagaacgattggtttgctgttggtttttttctttttctctccctccctgaaatggaatgcctttcagaatgttttggagtggggtgcattttagatatctctagtccttggcctagccctgacagtgaggtcttggctaagatacttaatgagttctgaatgcccctgtcctcacccttaagcagctgatttttcgaagttttgtttcgcttcatggtataaaaagcctagtcatgtgatctttgtaatgtttcttggttattttaatttttaatggtaaaaaatgcctgacagaaaaaaaaagaaaaacccaagactttcctgtgacacggtgcacttctgccttgtggacctagttggagagactgccttaccttgagaggtttttttttttttttttgagacagagtctctctctgtcacgcaggctggagtgcagtggcgcgatctcggcccactgcaagctccgcctcccaggttcacgtcattctcctgcctcagcctcccaagtagctgggactacagacgcccgccaccaggcccggctaatttttgtatttttagtagagacaggtttcaccatgttggccagatggtcttgatttcttgacctcgtgatccgcccgcctcggcctcccaaagtggtgggattacaggcgtgagccaccgtgcctggcctaccttgagagcttttaactacagataaagagctgaaacttcttgtgaaaatgtcttaattttattcttgggtccgtgggaatttagaactataggcttttaattgttcacagctggtgcatgaatagagtggtaataataattaggaataatatggttcacctcctaagctgttagttttaatccgttaaatttttttgaactgacgtctggcacagtcttcaagtgagaccatttggaggaggtccatcctaggtttcagtcaagaagtgtgcatgtctgtcttgtcctgctaatttgttacagtgatttctatggtttgattttaatgtttttcatctaaaaacacacatgcaaatccagcctacgctcaacaaaatccatccagacactcccactacagagcccttgcgtgacaattttctgtatctaagttagagggagcttgcagcctctcctacatccctctgcggtgggaggagccttgctaggggagagagggggtttgctctaagtctcttgtaaatggaggccgacccagagtgcccagagtgcagtgcttcctgtaattccccagagagcagtttggaaatcataaagctgatttacagttatttattccctgcccctccccccacactattttttgtaaaatcctcaaatttcaaagtattagtacaattgattagtgatgtttacttttcgtcatttcttaatgctccacgttacagaaatttttcaaaatgtttcaaaatgacatatttagtagagaataaggattaaagaaggaatgtgttcttgaagagtgatctggttggaggttgttttctgggaaggtttaacaaaatagttgtcttaggagaacacatcataatatcacattatttaatgaaacctcttttatcttagataatctaggggggaaaaatcctaaatttacacttaagtggtgaaaaaaattaaatcgcaatttaattattttttagaagtagtataaatttttttttttcttttgagacagagtctagctctgtcacccaggctggagtgtagtggtgcaatctctcctcccgggttcaagcgattcttgtgcctcaacctcctgtagctgggattacaggcgcgcacctccacgcatggctcggtttttatatttcagtagagacagggtttgttggccaagctggtcttgaactcctgacctcaagtgatcggcctgcctcagcctcccaaagtgctgggattacaggtgcgagccaccacgctcggcgttagaagtagtagtataaaattgatgatatcaacaagttgatagcttctcataatttatgctgcccactaatttggctaatttagtaaatagttgttacctggaactaaatgatttctcataacatgccttcttggcctttctcacgggacttcctggaacaagatgacttttgttgggtagagctgatataagaatccagccaatgaaactgtagtgacaactttttacttttaaaagtatatattgtaaaaagctctcttgaatctacaaatagaatccattttactaaagctagggtgttagtcacattatatttccaagaaaacacagtataattgtcactttcaagggccatcgaactgaagtagagaaaggtggtgactttatgggaacaccagattagtattagaaattagcgtgagatctatacatttagcagtttctaaaggtgatttctgctgcttcactcactcttactgtttcttgaagtattgattgtcaaagtgattagaggagcagtaataattcatttacagggagtcttactgccttttcctttccagagcctctcctcacattcccaagctgtttatatgtgatgttcagcttgtggacagggtgtgtgcttatgttttaagtatttgcttctggagagctagctagaaaaagcaaaacagagaaacccattggcgtgttgagagttgaatccacaagaagatgttgtttgcaatgtgccgaaaacataaggtccaaacagccggaacaggcctggtgccaggcaatttcactgtgagagaaagaggaggtctgatgcagttctctaaggattagctgcaactcagcagctgctgtctgagtttgattatgcacatcctgagacctgcattaacccttgtgcccctgggggaacctcagggctgtcttctaaacaaaggacttttcccctggacacccaggggcaaaagccaaaacaatatggaggttaaaagaaggcggagctctgggagactggatttgagagaacaatctaggaaggaaacggattgtagaattttggaactgcaagtgccttttaagaccctttcattttattgatcaagaagcagaggctcagagaagttaggtgacttgcccaaggagaatcagtcaaaacttaagtccaggtgtcttcattcccagctaagctgtttcatgcagcaccacatccctaatgggatgattttcacattcgtataaataatatgttgtgtatttttgaaaactgcgctgagaggaaaccaaaagcatttttgaattatgtgttaatcacttcttatagactgtccagggatattcagatttttctttcaaataacattttattagtgtgtaagtcttaataagtgacaggtaaatagatcattccagtagctaccatgtatgattcataaaggcagaacaggcgtcctgggaaggtgttaggagggaaagctcggatctagggagactgctctgaaaacaaggaaggatgtttatggaatgaactcttttgttcaaccatggcgatgtctggatcagggcagccttggaggatttatggcctccagtctggagaaggtaggtgggctcgcattatctgtgttgtaagaaaagtgtgtgaggtctttgagcctaaggctgtccaggtaacaaaagactctgtcaaaaaaatatgtctatttagagttctttgagagtaatatgttgctatttatttcacatctgtgtcgggtattgagcattttccttgctttgcggttgtaacaagatcctcagctttcttccttttaaaggttggggagctaatttcttgtaggaaataacacattaaatccaagcgtatcactaaaacatgtgtgccttctctttttgctcaattaaaagattgagctgttcgtgttttgtttgatatgggggtacttattgaacattgtcaacctaaagcattttgagtaaccaagagaaaaatcaggatggcctaattcactaaaattccaagtacatttgggatgtatttttatacttcttaattatgagattttaaattgctttatttttaaaggttgagtgtgagctgagtgtgtgtctttttctgtagtcctaccatcctttctgcaaaactcaagtgaaaattatttatttaggatgccctattgagatatagtggaatgtctttgtttgcatttattctttttctgggattttggttatatctatagctgtaaataaaggggaaaggaaggcttggagtgcatgttaggacaagaggtcccaagtaggaaaaaaagtcttgccttagagctatgccttgggaagtgctttttatttagtaacctaatcaggacatgcctgtgtctatttattgttggatgagcttttgaagtacatattgcctgaaagagaatttttcaagtggttacctatttttttttttttctcctctggctggagaaaagttagaacagaagggaacgccgtgtattatttttgttgttcttcactaaagacatagtcttggctacttcggaaaaagaaggaaggtatgaaatggtggttaatcctttcctccattttgtccccaattgcttgcagtgtctcttcaccctatcgagaaacactttctcaaagctgtctctgtactgtgctgatatcagaggagtcaactaaaagtgattttctctgtagacagttattctagtttatgggatgtattataaaactattggggaaaatcactgaactactaaggtaagggaaatagcttaaggatctatgatccatatttgaaatagtcattaagttatataattggatttttagagaacaagatagagcagtttcaggatgtaaggtgtaaaataaatctggtccatgaactgcttccaaattgtcaccctgaccagaagaagtaacattcctcaggttgtggctttatctagaaaggggaaatggctatttctggattagctttatacaaatgagtgtatttcccacctgctgcttttgcctagggttggaatttttccttttcactgcttgttacttggcgtttggatggaaacgtatcctccctttcagagccagaagattctgtgtgagtcatcaagaaaaatttctccgaggagttattaattcagttagttgctccatagtaaatggttcatgcaacagtgataaacctctgaatttgaaatctttctttaaaatcttttttccttcaaaaaatgcatacagtggattgctgagcatctaaaatcccgcactgttcagcactgtcattcttggtaattgctttttagaggatttggtggtgttttgctgcttaagctaaaccacgaagttaaacttttgtactgtggaagtagttcatgaatcctttagatttcttggaagaggaaagatgagtgtgtggtgaatatatatgaatatcgcatatttgaatgtgttacttactagttttggttgagcattaaggttgcccctaatggatgggatctctgccaggggtaactcttggagtcctaggtgctattggggaggaacctttcattctcggcattctgggggagatttacatctgtaagccggataaaaatatgtggaaaggtgattagtttaattggcccactattataattattcagtaggaggtggctgtgggactgctattatagcccaaaatgcctggtaggaagaggcggagactcattgaaaacagcagcaaggttataaaacgttggtttaaacgtgcatttaataacagattaccctggtgctttaaagacagaggaatgcttaagtatttggtacaagaatccatccaaaaaaagacgcggattttttttcaaagataattgtgggaaattctgctaatgatttcttttcccttaaaatatcatacaggggagtaggatttaggtaggtgtaaagttgctcaacgtgttggtaactttaagattatttcttctctggttgttgccacagacactcagggtggccacaatggtggtgttgttttaggcttctttcaaaaaagaagtccagtccaggataatgttgtaaagtggagtatttttctttcacatcaaagggcaaggaatgttttacagacagtgagctaagaagtagggcacagatatttcagtacttgcgttgggaaactatgtgtggaatgtcatagttcatataccagagaccccgaagtgaatccaggtgcctgcacggtgctgacttttcctggagtgagatgactgtaggcagaaattgcagccagatgaacctaaaataaaattgatggctttattggacattcttttcatgagatttaacttcttaacgtgcacatacatcactctggggatgtcattatcatggctgacctttcgtttgggggagctgctgctcgctgtctgtgcagctccgatcagcttggctttgattaccacccacatctgttgagcatgtgagagagagattttgaaaaatctcaagcacactgacaactggctacaaagatttaattaagaccggtcagaactaatttcagttatatattccagtttagggtatcaactcctctggtttcagaagggggagttatgacttcctaaaagttgttgttgaaggcagcatgaggaaatctccttgggcaagcagtgggtttctttgtcctagctcccccactgctacctggggttaatgattgcagggtggctggcgtaatgaaccagtgccggaaagcttattatcaacatgctgaagtcatatttagaaatcattcctcctccttttttctcctttccaatacaagtcagagcactgctgtggttccacctaataaatactgcaggcttcattgggctgttcaatgagacctaatatagtatcatttgtgcactttagtgggtggttcctatttatatttttgtgtggtttactgctcaatcttgggaagatgtggggtttgagggtttatcagttgcagttttttgtggaaccagtttgagtgagacaagactttggccattatttgtcgggttacatggatctccatatgagctatgaagatactggaataattgggtcacaataatgtaaaatcgtagtctgtactttcagctcattccagaggaatgattggaagccctgctctccctctcttctgcatgcaaacctcaggtgtgatttcggcctgtgcccaagtgttcttgaaatgttcaaggctgtccgttcccactctgtgatgaggcttccggttgatgtgtgacatcacttagggcaggaactggcactgtcttgatcctggctgtcctagagaagcttctgtgcttggccttgggaagccaccccatttggtgctgctgtagtctcctttctgctcctcttttaacagctgcctcccacctgtgctcacttccacctgcaggccttgttttccagtggcactggagtgccatgctgaggtcactggacaagttccttatcagagcccccttcccattagagtgaggctgcaccccatcctgcctgggcttactttgtgcgttgcttgggggcatggagaaggttcttgcccttgctgctttatatgaggtccaattcctccagtgtttgccatctcctttagagctctctggtgacaaaaccttcttcagcttgtctaccctccaggctggtgagttgaactcagactggtgctcggaaaggttaaaggacttgtccaagatgttaccttactggcaaactgcattcccaagtctttattgatctccgagggcatctcttaatttgttggagttttcttttcctggaaaaaatactgcttgggtctcagtttctccacatataaaatcagaataagaccataaattcatgtagttgaaaggggcggtttcaggaagaaaactaagataatgaaagcctccggaaaagggtctgggacgacattatttacagagtactttccacacattgtcagggtggggccgcacaggaaccttgtggggtaggcatcattgacctgtttcaaaaatgaacaaagtcagtcccagagaccttgaatggaggcttatcaaagctaagcatacggcttcaagtttaaccgtcaaatggtagagttagtcatggcttttggatgtgcgggccaggcatggtgcagggccaggtatgttttagccttgtggttcttttcctgatatttcggtcctgtgggcctccccaaagtggctttgcacctatgtttgttatgggcataaggaagttagaattctatgaatatgtactgattttttgtgattctgaatttaaataggcctctataaagctaatacttgaagttttgttgtaatgaagcatcacaaatacttttacataggaaaaaggaccaagctgatctccttaaagcggttgcaaaaaccacccagttgttatacgattgtttgtttcatgtttcttgttatgtggcatatttccagtaagtggagggaccaaatattttatagttacagaaacttcttctctccctccttgaagtttaaaaaagtggatcaaatgtctgcctattttcaaggaggcagggagacagaagatcttttccagattgcaggaaggccaacgcaggttgcacccagagaactatggaaaccactgttgaggaggaaggaattgggtgaaaattaaagaatcaagctagtaaaagtgaaaagaggcctttggtttttttttttggacagtttttaagggccttcataaatacttggtgtactcctcaaagaccaagcgttgaagggttaagtcagggaactaaaacttggattgtgtgttgacccctgtgtagctgtggccagggctcctgattttcccctgacgatccattggtagaacaaggccagtggtactgttttctggtgcaggggaggctcggacctgcaggggagttacggaggctggccactggtttggagcagacaggtaagtagcctctagggaggtggtagctctgtacaacagtctgttcccaatgtctgggtgactcttgttcccaatacttggctctctttttggatgtcagagtcatattcttcattctccatgtctcctgctaatttttggcattgacccatccaggatttatttcagcagctagcatggtgcctgacctatccatagtaggtgcttagtaaatactgcactccacagggggaagagggcaggcacgttctgcctattgacgtggtgggaagagagaccgtgcttagggacaggtttgggagcttcattatttctgccttgggactgtttgaatgcaccctattttgctataggggaaacactgcaataacataaatcccacttgaatcattctttgttctatcacccctgcccttatcactgctcttgtaagacagacatcataggagactcctaatcctctccctgcctctggtgggtgcatgacactgatctagcttccacttgcacagttctctctctctctgcccctaaaacagaaatatgatcatgttattctcctacttacatgcccgtcagtggctccccagtgccgtactgctgtggcacacagaaccctacgtgatctggtcctgcgtgctctgtaagtggcaagtcccagggcctcttcgtgcaggctgttcaagggggtctcataacctaccagtccgagttagacttgttgagtcttaaaaccaagctgctttgagttgggtcttcagatgaactgggaatcaacatatttgggatggatctgtagggtgcatttaaaaggcactgaatgtttggaatggagtgcaagaattaatgttaagttaccagagaaaattgaggtattaagggatctgcgcatatagttttcaaaaatcaattaaacaaaaagcctgttttttaactgattctatagttcatttggaagactatgtatattacattatatcatatatctacatgtgtgatatatttataatagaaaaatgaagcagaaacttctactaccaaatattaaaacacattataaagtgctgataaaagatgatgatgtgggcataaaaacatgcaaataatccaacaaaatagcacttttcaaaactttttttagcgtatggaataacttaattataagtcgttggggaaggaacagattatttgatgaagggggttgtgaaattgggtattttaaaaaatctatttatatctttgctttggtgacacaccaaaatatctttcatacggattggatttaagtatatatatttaaagctctaagcgagaaaaaaaatgtggagaaaatttgatctctgagaaagaggattttttttaagcctaaaagccaaaaactctaagtgattgctcaacttaagtacataacagtattcattttactgaagaattacaaataactaataatgatcactagaacagaaaaatgtcaaaagaaaaaacacacggtattcattgtcctctcataaaattaagaaagatttagaaaatgcaaatactcagtgctcataacaatatggttagattttcaacactttctaaaaggaaaaatgttaaaataaattccaaagaaaaaattttttaaatggtttggtttttacatatactggggaaacttactatttaaagactagagttaattatttcaaaataaaaatagtctttctaattttagtttcataatgttgttttttaatctttgtttgattttaaacaaccttttagtctttgggctgtccaaaattataaattatatgtctgtaatttactattgttaatcatacagttctccatataaaaaatggcagagagaaaaactggaaaaatatgccctgtgaaggggatttatgatccttaatatcccagaagaagaccataatgaggcatcttatgtaacagagaagtcatatagggcttcagtttctaaagtgctcaaattttaattcatagtgtgactttgaacaggctactttacctctcttggtctcagtgtcttcatctgtgaaatgggagggttgggttagatcagtttcccagctgagatgccccggcacagctgtgccaaaattctgatgcccctcggccctaaagacagctggacagagctggggtggaggccctaggtcagttacttccacccaagggcagccatttgtttttcccaaggaaaatagtaccacaaatcactctcaatgcactcttagataatgagttgtcttacttttaaattcaagaggtgagagctacatggaagaggagataattttggacatcacagtgaaccattcgtccttcccagtcaatattcaataggtatgttaaaaaatgaatggaagaaaacacatcaaaatgttattagtaattatctctggtgattgacttacaggtaatttttatttgcttatttataatattccgcctcattcaaatttactgttaagaatttgttaaatttaaataagaaaagttatttaaaacaaatcccaacctgtacccatttttacatttaaaaactccatgagtacgagtgacggctatggctgtcagagttaagaatctaacaaaaataaaacggcaaacatggacccatttcacattatggaaatatcctgggatattttcattccaaggtttcttgctcagtgcttactttcaaggctggtttcaggtgtgaggaagaagctttgagcagaaggcctgtttgtagagtgagtgagtagccttcttacttggggcagctgaccccaaaggtcttcctctccatctccctccttcagtgctttcttcccttatttttccccttccctgtgacccctgaattgctgataattcctttccttctttgttcttctcaatccctggtgtgtatatggttagaagttccggtgcccacttagctgagccacagagattccatttttaactggtccctcatatgccagcccatctagttcctcaggcattaccgccttccctctcccagctttattctgcttatttacatctttctgggaatgatgtgcttcaaactttccaacctattagtttaaaccagatttagtggcaggggcggggggaagtagactttctctgccctttggttttgctttactttgagataaacactatatacattaaaggtgcttaaatgatgttttctctgacttcctaaaggggttacttttcattgactcctaacattttaattctctgattgtgattgttttgtctaaatcatggggtggagtgcatgtggggaattagaaaactaattgtcattataacctttcagcagaattttggaatgattaatagctatgttaatatgccataacataattacttataaaaatcagaatataccaccaccttgttagtattaaaatggtgctaggctgggcgcggtggctcacgcctgtaatcccagcactttgggaggcccaggcaggtgcatcacctgagatcaggagttcgagatcagcctggccaacatggtgaaaccccgtctctactaaaaatataaaaattagctggacgtgttagcgggtgcctgtaatcccagctacttgggaggctgaggcaggagaatttctggaacccaggaggcagaggttgcagtgagctgtgatcgtaccattgcactctggcctgggagacagagtaaaactctgtctaaaacaaaacaaaacgaaacaaaaaaacctgctaaaatataagttactttctttatataacattttaggaccttacagtgtaccttaactttctgagcatagataacaaatgaagataataagaaatattgttttatattgtttataaagcactgtgccctacattgcagtttatagaaccacataacagttggccatgggcagtatctcaggaagccttaaaatctcgggaagactgacagaatggcggagctaagatggacctcagggtcatctaatccagtgtttcccaaccattttcacatcatggcacacattgaaaaggtgcacagcacaccctggggaaataaatgactgctcttggctggaggtagtggatctgaggactccagcctaggctgtgtccagctcccctgagggctgatgggcatcagaaccttggcgcagctgtcctggggcattccagttgggaactgtgatctaacccaaccctgccattttacagatgagacacatctgcatttacatatcgagacccagagaggtaaagtagattgttcaaggttacacagtgaattagtgacattatgataaatagaatttgagcatttcagaaactggagtttaatataacttctcttttacattgcatgcctcattatgttgttcttacagtacattagaacttttatagggcacgtttttccaaaaggtttacctctgccatattgtatatggagaagtatgattaatattagtaaattatagatatatctcttttggacaacctaaagaataaaaggctcttttaaaccccaaattcaagttaaaaattaagattacgatgctaaaaatagtctaacatatgtaaaaatgatttaaaaaattttatttacacaaagaatgtactcaggctatgaaacttgtatgctggcagttgcctcactttaaaaaataaaagagagaaaagtaagatggaaaagaaaattaaaattgtaaacattttaatgactcaccactacctccatccttagatttctttgccatcaactatttaaaccctttaagaatattaggaaaccgtggttacttggcgtggttttataaatctgttctggtaatctctaaattctccttcaaccccatgatgattcactgattctagtgtaatgagggcttggttcagccttacatatatttatgtgtgtgtcaaccaagatgtacatgggaacatggcatctcatcttcagttctttgtctgaaccacaaaatttatgtgccaattcaggacagtttatggcgctaggtttgtaacatcagagtgacttgttccaccatgacctcaagatggtagctgtagactagcgacaccttccattaacagctggttgaccttggagaagttctataatctctttttttgcctctgttttttcatctgtgaagtgaaggacaggctgcctacctgctaggattgttatatggattaaatgcattagttagtgcaaagtcttgaacaacacccagtgcacacagaaataaatatgataaataagtacagtgaatgtgggccgttttcatcaccattattagtaatagctgccatgagttgtcattgaacagggagcagtaagggggcctccaggtataaacaagacccaccctgctttgtcagtctcaggttttataaaaatagtcgctgcctaactgagttcttggggcactaaggaataggattattattaccagatgcccctgagtctctctgcttattgaggcgtttttttttttttttttttttttggtagggctttgtttgggaaaaaaaagaaagaaaatctacctccagggacatgggtaaaatattttttcccttagttaacgttaaattccagtcattcttttgcagaagtgttgtggaacagaagggaggggtaaagattccaactttagacattagactaagaatgcatgtaatgagtacccagacagcatgacactttttcagttatcactgccacccccatccccccaaaaaaacacactgtgagggaaagagcaagagctgtgaactcagacaggctgagtgcagcccctagcccgcacttaatggctgagtacatccgggctatgcattcaccttctctgatgggtcttctaggttggagtcatcttctagaggtgctgtaagctggtgtaagagactagcaaagtgccagcagcataggccctgtgccctaaatgggcccacatttttctgagttcatctttgctaaagggattttttttcttaagtacatactgtatccagaattggtgggttcttggtctcaccaacttcaagaatgaagccgcagacccttgcggtgaatgttgtagttcttaaaggcagcgtgtccagagtttgttccttctgatgtttagatgtgtttggagttttttccttctggtgggtgcttggtctcgctggcttcaggagtgaagctgcagaccttcgtggtgagtgttacagctcataaaggtggtgtggacccaaagagtgagcagtagcaagatttactgcaaagagcaaaagaacaaagcttccacagtgtggaagggggacccgagcaggttcccactgctggcttgggcagcttgcttttattctcttatctggccccacccacatcctgttgattggtccattttacagaaagctgattggtctgttttatagagagctgattggtctgttttgacagggtgctgattggtgcgtttacaatccctgagctagacacaaaaattctctatgtcctcactagattagctagacacagagcactgattggtgcatttgcaaaccttgagctagacacagggtgctgattggtgtatttacaatctcttagctagacgtaaaggttctccaagtccccaccagattagctagacacagagtgctgattggtgcattcacagactctgagctagacacagagtgctgattggggcatttacaaaccttgagctagacacagagtgctgattggggcatttacaaaccttgagctagacacagagtgctgattggtgtatctgcaatcccttagctagacataaaggttctccaagtccccactagactcaggagcccagctggcttcacccaatggatcctgcactggggccacaggtggagctgcctgccagtcctgctcggtgtgcccgcactcctcagcccttgggcagtagatgggaccaggtgccatggagcagggggcggcgctcgttggggaggcttgggcatggcgggctgcaggtcctgagccctgccccgcggggaggcagctgaggtccggtgagaattcgagtgcagtgccggcgggccagcactgctgggggacccagtgcaccctccgctgctgctggcccgggtgttaagcccctcactgcccggggccggcggtgcccactggccgctcagagtgcggggcctgccgagcccacgcccacctggaactcactctgacctgcaagcgccgtgcgcagccccggttcctgcctgtgtttctccctccacacctccctgcaagctgagggagctggccccagcctcggctagcccagaagggggcccccacagtgcagtggtgggctgaagggcccacctctcgaacgtggccagagcggacgctgaggctgaggaggtgctgagagcaagtgagggatgcgagggctgccagcacgctgtcacctctcaatactttaggcaatttcttgtggtggcacatttgagactgtttcatgccagtggcttttccattttcctttctttttttgagactcttgctctgttgcctaggctggagtacagtgatgcgatgataactcactgtaacttcaaactccagggctcaagcgatcctcccacctcagcctcctgagtagccaagactataggcgcataccaccatacctggctattttttttttattttttgtagagacgagggctcgtcatgttgcccaggctgatctcaaactcctggactcagccagtcttcctacctcggcctccaagagtgctgggattccaggcatgagccactgtgcctggctggccttttcactttctattaatggttctcggggtcatctcccgctgcccttctcccccaggaatattttagcagcattctaagttatttcagctccttcagttttgttgctcatatctttgctacccttgctcaccattacaattcaaagcctcactgttcttgctttctcactgatgggttaacctttttttcttctatcacaaatagggttgctagataaaatattgggcacccagttaagatggaatttcagataaatgccaaacaattttttttttttttcgagtcagagtctccctctctagcccaggctggagtgcaatggtgcgatcttggctcactgcaacctccgcctcccaggtcccagttcaagcaattctcctgcgtcagcctccgagtagctgggattacaggcatgtgccaccacgcccagctaatttttgtatttttagtagagatggggtttcaccatgttggccaggctggtcttagacttctgacatcatgattcgcccgccttggcctcccaaagtgccgggattacaggtgtgagccactgtgcccggccccaaataattttttagcctaagtgtggcccatccactatttgggacatacttaaactaaaaattatttgtttatctggaattcagatttaacagagcatcctgtatttttaagtctggccactctacaaatatctgtaccaattctcccattacaactttttacccacacggcagcatgttttggccaagaggaataaaagaggcttctcagatatttcctaaggccctgttttgacgaacttaaagagaaaatgccgacaggttaataggagattctgacaacgaagaggaattcctgtgattttaggggtagagatatatatcgacttcgatttgggagatcacttggtaaatgtgaggtgtctgtattttgggctgaatgtcaactctggaagtaggtaaaagttaagttttatatccacatgctattccacctccgttcaaaacttagaaaaatattgtcttccatacctaattcacagtcctaatgatcaggtattagctgaacagaacaaagaagcctgccttagaggatgttgtgaatgggttttggggatggagacttgagacacaatataaaaagatggtcagaccagttaagtatgacatgaggcagttttatgaaacgtaaaaatggctttttcatgcagctcagaggcatggatatagaaagggaaaaaccaaaaagaaatgatttgtgtatgtcagcccactaacatttttggaaatgtgcctgaggactaccgaagtaatcagatgacatggacttgccccttgaggaatttaatttatgggtgagaaatttgaaaagaaagtggcttatcctagcttttctttttttttttttccttttgtttcttccaaaaattttctcccaagggacagaagtgggtctgccacagctatggataggaataaccaagtgaagggaggcagtgacgtgggtacttccacatagaggctgcactctgatgattcaggaatatttcttgagtacccttttattttattttattttattttattattttgagacagggtcttgctctgttgcccaggctggactgcagtagtgcgacctttgctcactgtagcctcaacctctatggcccaagggatcctcccacctcagcctcaacaagtagctgagactacaggtgtgtgccaccatgcctggctaatttttctaatttttgtagatacggggtttcaccatgttgcctaggccaatctccaactcctggactcaagcagtccccctcccttggcctcccaaagtgctgggattacaggcatgagccactgagttgagtaccttttaggtggattgtcatcatatttgagtgcctagcatggtgttaggtgctggggatgtagcaacagtcagcaagggcagagtctcagtcagctctgtagagcttgtgtgctgtcatcataggtactttgagaaatgcaaaggtagaccaggtaggatagggaattctggcctctaggagcttccttagggttgattacctatgcttttccttctgtggcaattggagactcagtctgctgttggccagaatactggataactggcaggtaactctgcattgttaggaaggctgatcagacttcaggtcccccattgaggagttttacatctgaatcttcagcagctggtctaaactgacaatggcaggcttcagtaaaatcagccattcaatttatctatattataaaatgatgaaggcatgctccatctggtatcagatagagtaccttctaatattggtgcattatcagtacctttgtgtgtagggggtctgctgtaatgaaaaacagtagagctcgattcatcctaattacattttgagcaattttagggggctgaaaagattgtactgtgacaataaggtttttccttcttaccaaaagaatttataaatggtacagaaaatgaaagatggctagtggttttagcagttctaatgttttttctttttttagataaggaaaaaaaccccactctgattctaaaacccgctggaatttgaactgttgcctgtgttctgaaagtgtcttgaattgcttgggatcccaagcctgaagtttacagcatctcatggtgtccaggtatccaagaggagtcataaagttctccgaaaattgtgaaaaccatatacttaagggaccacacgcatgcagtggagtattcttcgatggcagcattttcttttgcgggaaatagcaaatcaggcagtaatgaggtgtaaggtcagaaaaactgcatagaaatcaatgactaggtgttcagagaagttaaaagaaattaataatttttcttctgtatgatttttgctttgggatattttggttattttttactggtttcggatgctattttaatgagtattttgtttatattttgtaggcccatgaatatgaaggataacttagattttaaaagttctttcttctattccccaagggctgatggacttaaaaatacctgtcagttgagccttcaaaatctttttattgacaagtgactcctgacttcaggcctaattggttcctgaatgtttagtcttggggcatggtcataacacaaactcttacttcctgcaggctgtgttatctgtaaagcttatgttttgttttttgtttgtttgtttgtttgtttgtttttgagacggagtctcgctctgtcgccaggctggagtgcagtagtgcaatctcggctcactgcaacctccacatcccaggttcaagctattctcctgcctcagcctcctgagtagctgggattacaggcgcacaccaccacgcccggctaattttttatttttagtagagacggggtttcaccatgttggtcaggctggtcttgaactcctgaccttgtgatccaccctccttagcctcccaaagttctgggattacagacgtgagccactgcgcccagccaaagcttgtgttatatattgggcttccattcctgaaagctggttttatactatacaaataacaaagtcaatatgaaaatgtgtcaaaaatatgaatgtacctcttaaatacacatattaactatttcaaacaaaagtactaaagataaaaaaaagttatactgtaaatgttactttcagggaatttttttctgctgaggttgagttgactgaagcttttaaagtccaatgttaagtctttctaaagcatatagaggtatttttttttccagtgtttcaaggtcttttaaattgtgttaaaaaacagagttatctgcttccaattctattgcatatgaaaagtgtagaaatgctgggaagtttgttaattgctaaaagttgaaggagggacagtttccatggcaacttcttcagtaacccatgctctgatatttcagaaggatattctttgctgagctgtgaatgcagtattaagaattcaatcaaatcttcagaatgtgaagagcaattgctaaagaaaatcattagccctgtgcacagttagaccaaacagctggctgggtctgggctgtcccgtattgagtcagccttacctgtccactaatcaaggcgttgccttctggacgtagtccttggtgagtctgctagccgtctggttttggtcatccctatgaaagtcttaggaaaggcagtaacaggttgagctgtctttgattgagttagattcatgactgaatatcattagggtgtattcctttaatctgtatgtgttgggaaatgatttgtgtgtctgaagaaagtaagcaacatataaattttgtctaaaaggccgcatttatgctgtaataattttctcgtttttcttttaaataaggggacaaaccagggcctgacattatcttgtaataacgagtactgagcatagaattttatgtgtccatgtctgtgccttcatgaattgtcagattctacagacatgacctgaaagggagatcttttatctcccatgttttcaaagatgaaacccatctacatgtgaatgagatgatataaaattattttcttcaaacatttttgggtacttacattttcttactgatcttctcgactagattttgtgctttgtagggttgtgcacgtataaagtactgaagtatttatggattttataatatgttgactcattttctggttgaatttatattttcaaaaattattaaattatattaaaggaagagaaacaatcatcttgcattattgctaatagtcaagtaaacatcaatctctaaatgagcgtgttaagtatagtacatatttgcttgcctagcactatgccatagggatcaaaaggaaatgtaggaaatgatgcctgcatcgtttaagttgcccagtctgattttataacctcttattcatagttgaaaagcaatatgacgtgaatttaattaggttttcatttaacaaggcagtctactccgtttttttcattcattctgttttctcgtgttagatggcatttctgatatttatagtctttggtcattcccctacccaggttttccaattttataaggtgtcatttctggagcaaggtataatttaacccttacctacccttaggacaccatatgatataaattaacttatcctgacttccataaccacagaagggaacctgcttggaggcagggtctcactgtcacccaggctagttctgaccagttaacttggttgggaaaatggggacatattgacggaagaaatccttttaaaaccagtcaagcctccagtaagtttcaagaaataggaagaaaaatgtagtgttcattacatgaatatgaaaatcatctatgattatgcctttctgatgtctgttcagaatctcaaggaggggagaagaaagaaaaaaaaaagcccccccgccccgccagctacagccttgacaactatcagaattgcacaggaggccaggcgtgtaatcccagtactttgggaggccgaggtgggtggattgcttgagcttgggtgttcaagaccagcttgggcaacatagcaaaaccctgtctctactatatatatgtgtatatatatatatataaaaattagtcgggtgtggcagtgtttgcctgtggtcccaactattcagaaggctgagatgggaggatcgcttgagcctgggaggtggaggttgcagtgagccaagatccgagctactgcactccaacctgggtgacagtgagaccccgcctccaaaaaaaaaaaaaatctgtatggtaacttcagttgggcctgcctctgctcacccgcccatctttaggaagccagtcttagaaagacagtggctggccagaggcctccctccccaacactcctttcccccaacactcctttttcaaacttctgtggttatggaagtcaggatttgaaaagagatttagcaatgtttttctcattctgtagtggttttctttttccggttgaagaggctatcctcttggccttcatgaagtaggttttaccacagcgttgaaagtgaagtattaaaatataagctgataagagcaaggaagtttaccagaaaaatttcagttcacatagggccaagtaggttattgagtcgtgcattctttttgagtggtaggaaatagaagagagccttggagaagcattttcttacctgactttagttcatctctgtttatctaagaaatttcaaatattccagtctaagagatttgaaattctgtcaaatttaaggagactgtctttcagtctctgaagtatagttatttaattgattaaaaggtattatagataaacaaaaatattttttatggatatgtgtatacatacagtggaatattattcagccttaaagaaggaaattgtagactgggcacggtggctcacacctataatcccagcactttgggaggctgaggcaggcagatcacgaggtcaagagattgagaccatcctggccaacatggtgaaaccccatctctacctaaatatgaaaattagctgggtgtggtggtgtgcgtctgtagtcccagctactcaggaggctgtaccccgtctctcctaaaaatacaaaaattagctggacatggcggtgtgcacctgtgttcccagctactcaggaggctgaggcaggagaatcccttgaacccgggaggcggaggttgcagtgagccgagatcgcaccacaatactccagcccggtgacagagcaagcccatctcaaaaaaaaaaaaaaaaaaaagaaggaaataatgctacaacacggatgaactttgaggacgttatactaagtgaaagaagccagccagaaacagaaagacaaatatttcatgattccatttatatgaggtacctagagtagtcaaattcatagaggcagaaagtacaatggcggctgccaggggctgagggagggggcaatagggagttagtgtttaatggacacagatttttagttttttgagatgaaaagagttctggagatgaatgtggtgatgattgcagaacaatgagtatatttaatgcaattgaactataggcttaaaaatggttaagagggcaaattttattttgtgtgtattttaccacagtttttaaaaatgtttattgagcacctgttctttggttccagttgagctccaatgactgaaacaaaggccctcagccttgagggagctgacaggtgagttagaggtgagcatgtgatgctgctggaatagggaacacaaggtcattgtcatggattaggatgctctggtcctcagtgcaggtgaacttgaacctagccatgaaaaagcaccagaaatggctctctttgtaattttcacttctccccagcttcccctcccaatatgtagtgctgccccactgctgcatcccaaagccaatgccgtggatcattttaaccggctgctgctttaactggtttgtcttctgctcttttcctaaatccagctctgctcctcctccttggtctgcacttgtaaggcctttatttgatgtgcatgtatctcccattttatagcccacatcatttttcatcttggactataaattcagagaagatgtgggctatgcactttgaccttcacagcacccagcacagtaaaccataatgaatgttttggatgaggatgaggctctgaagttggaagctgacatggctaatgcctatttaattgaaggttattaatgcctctttagcagtgaaggctagatagtcttctgtttacagcagagaaggaacaagccctcaagctttttccagtggtctcaaagaattctctgtcaggtgttgccccagtacacactgacctgaacttagcatcccggagaatgaaagggacagttggggcagtggggcagcttccccccgagaagacaagcgtcttctcctctgggttcatggttcccaggtgggaattcagggcgggggtaagtcagaatatttatgttctagttcagcttattaaatatgagattttccatctcttagtgaatagagtttgccttctgtccagcatgatagttctaagtagggcgaccatatgtcccagttttaatacctatttgcctggattaattattaatagctccccctttaagagtgccctggtttggatgataaatattattgctatccttgttacaagggggaacatatagagaggatagttatacaggggaaggtggggagaaagagggaggggaacttaggcaggctgctggagattcagaagataaggaatgtgagaaatagctgtgtagtcaaacatttagatgttttttggatggaaaaaattatttggcttttaaatgataagctagtctaataagttaggatttgaaagtcttgatcaaagggagattttattttatcagtcatagtataggatcttttagtgcaggttaacaggttaatgtgtatactcagagcttcaggtattttatggctaaagacaaaagactttaatgtacaaatatgtgtatatatctcacatttgtttctttaactatgaaaatgaacttagtctgtttaaaatcctgtttttatttgcatatgtatttaacttagataatggtgtaatggatattcaatattgattaaccttaggtatgaggaaaagccacattggtaatgaaggaaattaggtaggaccatattaattccttcatatttgttaagggaacatcatgtaatctgaacaaaataagtgttttataatcaggtgttattttggaatttttatattcaaagtttttgtttaaatcagtttgagctggttttcggtgaaggagttgtatcaatatcactttaaatcaatggaaagtctaaacatagggtgctctagggttgctccatcaagcagcccggcagtcttagccgcatcctgtgtctttccatttctctttggcgtccctggtgtgtgcttcagcctgagccaaatgctcaccttgctctggggaagccatcatatttgagtttttaaaaatcataacagtatgtgtatatgagtgtgtattataagtgcgtgttccttgtgtacttacaaataaatttataatttttcaaagttatctggcggtattgctttacattttgaaagagcattacagttttagaaatgactatttatgtcattggatcagcaaacaattttacaggatgcagaaattatcgattgtattctgtatgttagtgacttactcgagatgctagagctgtcagaatgaacttagactaaaacccaggtcttctgactctatgtccatcaccctacccatgatattgacttgtagatgtcttgcccagtaagtatatttcagaaagaatttttcttttacaattgcttttctgttttggtttaatttgatgttgtcctacagtattccttgttaggaaaaaaaaataacctcggtgcctttgggctaattggatgtgtacttacctatctgcaaagtgtacttactgatgcaaaattatcaccatcctaccggtataccttgatggtggtctcagttcaaacatccttttgacaactctgcctcagttgccgtctcagtacatttgtaccataggagcttttctgtctgtattctttacctcttgtccttcctgcttgctgactgtcttttctattctaacctccacttaaaagacttatgctcatccttcaagaactacctgaaatgctgccgcctcaatgatgttttctctgttcgttctagcgatcgctcttttctctcttgagttcctgtagtgccttgaatttctcttctggcccttatcataccctgctttacaccacagccatttgtctttattatattcctccctacaagattgtggtgagcttctcaagggcactggccatttctcattcatcttggtgtccccacagcactttgcacagtgccacatcccttggaaactctgcagttcattttgttttaaataaatgaatgggtttagacatggttacacccactcataagatatgaggtgattgtagatttttacagcatatggagattacagagaaccttatattggtataattatcacctggtttgtgcataattaaaaatgtaattgtatatttttatgcaataggttatcatgtactgttttaagtgtgtacagttttttatgggcctaccatttagttaaattgcatagatgctttttagaatgctactgtgaagaagtgcagagttgaggtcgtttttagaagctcagtgagttggccccttttgctctctgtattatccttttaggctaagctgcagcacagctgtcccacctgactagctttcctcctgtggctcttattgtcattgcattagctgagagaacaggttttaagatttttaactcttctctgcctagcctaggtttcagaaatattttagagggtttttagaaagtcgaaattcagtggataagacttttgatagttttcaggttctctttgttttatgtaaccttcggtttttaaaaatgtttacatttcactccattttcttctaatcctgtagatatgggactggcctaggatctggcgttttaaataatcttttcacttccccttcccccaacaaggtaattctgatgtcagggagacagggaaaaattcacctcgagaaacaccatgacaggtcagtattggggaatgaggacttgagatttgcctttcaaaatgagtaaggtttaagtggatggagaggagatgatttccttgtggaggtaagaaatggagcaaagtctaaggtgagaatgagcacgtaatattaggagagaaggagggcaaggaggatgctaaccagctttcagtggaagattattttagagcaatgttctcaaactgtgggtacattagaagtgtaccatgggcttgttaaatagccacattcctgccttccaccccgaccctgaaattgcttgtttgggcattctgtgggcttagggtggtggcctgggcgtcggcatttctaacagacatccagctgaacttggtgtgatggaatccctgctttatggaataaaagagggtctgctgacaaggcagcagggactgcattttggcagtccttactgtgttagatgaggtttcggagttaagatggggacactagaactctagctgggaaatcaggtgcagggatgctgcataatcccctgaggtgatgcgtgcagcgaggcaacagcagtcaggctctacagggtagaatttattctcagaagaaggtatagaccgctgacaaaggagttcactcctctgtaaactgttaaggaattgcaaagaaattttccatttgtaatctgctgacatattttagaaaggtagcctccttaatccacccctctaaagacctgatggtggtccctcacaggtatccaaagtagccttaaatcagagactggtctagttggaggatgtgacttggaatctatgaaccctggatgtacttgagggcaactcacttgaaactttggaatttcatgtggatgcatgttttctggagagaggtcctagagtcttgaccatattctcagacatgcccttacttggatttaggataagatgatttagtacttggctcattgggtggctggctttctctctcctctcttttttaaaaacccagaacaaattcctattagtgaaaaagaaacaatagcttgaagaacaaagaaggccccagaccataagatagaatgatagaagagccctagattttccaacagatgaccctccctttatttttgcttgggtgggtgtgccattattaataataagccaggggaataggggattgagaagctcttcgtagaatgtgtaatgaatttttctgttccttgtggagcagtttcagtggtttcagctgaagtacacagagagggctatgttaacagtaaggaggtgaattactagttattgctatcaagtttggagctggggagaaagcgggtgtatgaaacaggaccatgtgtgaatggatttctcaagtgtttcattaaagatccgtcagaacggttagcactctaaccatgcttcagtctctggcttctgattcctttgtggaattaaaaatgcttttgggaagaggggctaaacaagccttttgtctgaatttccatgtattgattaatggacccagcagagcatcctgctgtgaattctgtctgctgatggtaactcttacaatgagcaaagcttttctgaactggcattttccactcagcctgtaggctgctgtattgggtgtgacaattttttaaaagccatcatgctagaatgaaaatgagccatttctaaatggcctattgatttgcaaaacctttttgtgttggattgaatggtttcatatctcagctgagggaaaaagatgcaggctatttttaatttattgttattttatcttaaagatttgagttgacaacgttttggtcatgatgtttacctactgttgaaaggtctacttgcatgtcatgacttgataataaatgtaaaactctggttcattagcttacactataaaagagttctacagctccacttacagtgtgagccacagtcagtaaatatggatccagaagtcctaattatgactcaagctcacccataaacttggggaccaccttcgcaccaacgctgtccactgggctatttatggaagaagccactaggaactgttaggcggctccatgtgtctggctaacagggtctttattcattcacctcatcacggtattcagtcttgatgctagtgtgcacgcttcctaagaattacagatgggaataaaaggtgtctgggtatacctggggagtatatgtttttgcctgctgatataggatactagggtagcttgtatgcaaaagcatgagcgtctaggtttaaaggattctttttgttaatatctgagttgacttggtatggatccttgtttgatttttttttttttaaatttttatgtatgtatgtatttgcttttgagacagggtcttgctctgttgcccaggctggcatgcagtggcatgatcacagttcactgcagcctcgacctcctgctgctcaagtgatcctcccacctgagcctcccaagtagctggaactacaggcgcacaccaccacacctggctaattttgtttaattttttgtagagatggttttgctatgttgcccaggctggtctcaaactcctgggctcaggccatcctgcctgcctcagctttccaaagtgctgggattacaggcgtgagccaccacgccaagtccttgattgattttcttaaccccttgatggcagcttttgtagatgtttcttacttccaacaataataataatgataaataataaacatagttgaaatatctactatttgctaggtggagcaatttcagtggtctcaactgaagtagctgatttttgtaaaatgcagaaattaaaatcaaaatgaaaaacaggatggttttcccagcctctctgtacaattttgattagggtacagttacaggttgggcatcccaaacccaaaaatctgaaatgctccaaaattcaaaacttcttgagcactgacataatgcacaaaggaaatgctcacgggagcattttggatctcagattttcagatttgggattctcaactggtaagaataatgcatacatttcaaaatgtttccccagacatgaagggtcaaagagaaagttcattctaagagtcacagatgctttttgctgcagatagatgatatgattcatcttgacagagggattcttctctaatctgcagacaggagtgagcaaagtgccaccttttcacttgttttaaacctgtactttactccaacacttcagtatctcctttttctcttcttgaagtggcatgaatcttagggaaaggtgaggagctcctagaagtagctgtcaccagaaacgggccaatgaacttcctggtccaagtcttctgtttaaactcccagttttaacattgagcgtctgctttgcaatgaacatgaaacaaggaatttgcagcattgagggtcgtacgcttcactgacttgaggtcagtgttgctggtaagtaggcctatggcagtgaaaaagctttgaccccaattccgtgggggacagaacttcctagagcattctagaaaacagggtacacgtggagtagatgccatattcagtgcgattttgcagcataatgttgtgttgtggaaacttccctcttaccactgtgccccagtaaattgaactcgaaggtgcctctgtaccttttgtctcttgtataggaaattatatctgtcagaaacatttcttaggtaatctgagtataggaatctaaaaactgagtactcttgtactaaaatgagacaccagtttctcaggaaaacttaaggaaagcatgttatttaaaaacaattttgaatatttctaaactttctcctttgcatttttttctccaaccagaggccttggcttagataaaataaactaataaaatctttttttcttttcttgtttcctgttgttgaatgacaacctccctgagcagcctggtggcttggaggctctgatgtgaagtatagaataggtggagggcgaataacaaaagccttatcatgtagatagccctgaaatgggaccacagtctttatctttgagaactgtccagtgactgctgcaaactgggcagctcttttggaaatgagcagtctctgatacagctggtaggtagaaccaatttggcccctaataggctaactggagccagtagtttaagggggtgattattaatttgccttgtgtttgtcttcatttagagtaagttcatcaggctatgttttcatggtaccttgcatcaaggaaaatgtggttctgtaagtcttcatatcagtttctcttcgagagtaggagtaataatgcatatatgtttgcatatttccaaatgcctttgtttagggactcaataagtatttactattaaatttgattttttagttgaataaacatgttttaaacaaaaattatttcctaattttgactcagagcctagaaactgttataatgtgtggcatatacacttcttttttggctaagagtagagttagaatctactttctaattcatccattttgaacgttgaacctgaaatccagctcatctttaagattgttgtatctgctaggtttggaattttaaacttggaattttggggtctccttggtggtgtatagtacttccagatatagacagcatagatgggtctcttagctcatctgaaaatgggagctcaaaattttttcaaagatctcatatttacaaatgaataagtataatgtaaaatgcaaaaatgaaaatcaaaatgaaaacagggtggttttcctagcctctcactaggattttgattaaaatacagttacaggttggggttccaaaaatccaaaaatctgaaatgctccagaattcaaaactttttgagcactgacgtgacacacaaagaaatgctcacgggagcattttgggtcttggattttcagatttgagattctcagctggtgaggataatgcaaatattggaaaatgtgaaaaaatatgaaatccaacacacttcttgtccaaagcattttggataagggacactcaacccgtttaatccaagcacttggtggagaatgttgacagtcactttcagaggtagacaaattccactggcaagtttaatgactgatggtattattattgttaactcacacttgtgtcaaaggtgcttgtgacatagggagttttgctctctccagcatgtccattgacttgagctggttcccgctcaacacacagacctcagggccctggggaaataacttaggcagcccaaacaagacccctgacctctgctgtataggcagatttcattagcaaatcagaaatgttctatttaaagtatattacagtgattcattgtagattaactcacaaatcaagacagaccagtgcccttttgtgattatttttcatcagcctcaggagcctctagaagcctcctgtggaggtctcacgcatggggtgacaggagtcaaagtgcttcctgctgatgggtgtcctgatttttttctaggtctaatagtatcagctgtgggttccttcctgtagtctttgtgatcatctgactggcaaggtctccaggtatccacagctcacaagttactattggcgagggcttggaacttgcctcctgcccagccagtgatagcatgttcatgcaagtccccactggccagcagggctgctggaatagtagatggctctccctggggagttctgcctggttcaagcatcattaccgtggggaggatttctttgacccacacctagtctaggcaggtggtgcaagtgcagagacacctgtcacagccttgctgtgggttgcatcacattcctcctaaaagctccaagaagttcacttctcactcactaagtgggattgagagaaaacctgcctgtagttacaattttcctaatcgaaactcacctcttttcagtaggacagtacaaaacaggctactttctcagtaaataattactaataactaacactgatatactgcctgtttactatgtgccaagtacctattccaagcattctgtgtattttaagtcattgaatcctcccagcaatctcatgagacaggtatactattattagccctagtttacaggcgaagaaaccggagacagagcagttcagtaacttgtccaaggtctccagtccagtggaacctggaataactcatccagctccaaggcccacctcctcacctgtcatgcctctcatcaccaaatgcaagctagtttcagggtggttaattttggagctgatgagctttacaggtgattgaatttaatcatttatgagagtaggcaggtaggatatgccaagaaagagatcttactcagtaagtttggcaggcctccatattttgggcctttctttgcttccccctgtgatcccaatgaacttgggtaccaagtcttcttgttcccattacccttttcttggaatagattttctcagataatctccatctttctcccaatctcctcttccttcttcctttttcttaaacaggatgagcctgtttactgctgggggcagggtatgtatccccatgagtcaggggcttgattggtaggggaggtgagtgttcatgctgcgtccctagacatcttgaatgtcccccaatttgagcaagtaacacatcacttagttctgcaacagaaccagccacacattggtgtgtgtttggcttgcctctgatttgatgttgctcttttctcacgaggcttggacaaaactcctgctttactcaaatcttgtttgagttaatatctcagcctccaggtgaaatgaggaatgaaatacagattttagtatctaatataaaaccataacttgtttttactctgagctccatcttgggactatattctatccagaggccctgaggaacttctctccctcctttgttttgatttattaaagttcttgaattatatcccatgttattgatctcagcaaatgtgggtttcaaaattgagagagaagtaaatcgtgctgtgttgttactgtgcgtttggctgaattctgttcaacctctaaaggaaaggaaatatatcatgctgcagtcttttaacataaaatcagtttacactttgccattctaaaaaattgatcagttcaatacatttgataagtgccgcaagtaaggatttactctgattcagtatcattgtcaagtcctaaattttacttaaatttttttaacttacaagctgtcttcctctaaatttaggatggaaggggacaaagaagtttttagatttttgtcactgatttatagcatgtaattaaggtcattttgtactattttgaagctccattttgtttcttggttatgttgttcttagaaggaatactttaaaattgttgagtgtatttagttaatgtttcatataaaatggtatctacttcccctcccccaggttaggagactctgaatgatgaaattcctctgaattatcttgaagtatcttcttagaaagtaatgtttctccaattcattaagctactaagagttttctggtattgaatgaaaaagaattgtaggtatttcaggaattcctgaatagctgttttataaccagactgatgaaaagaaagccattttagatgtggggttgtatgtaataaaagtttcaaattttaaaaataacacagaaatctgacatttattttagaaagtgccttttttacattgagggagaaattaccgaaaggcataaaataagttttatctgataaatatttaaaatagaaatgtgtctgtgaggtataactttttaaaagactcaacccccacaaaccagtatttctgttgatattaattttagaaaagattaattacaagtattcaattttgatgctgatctataaaatatatattctaattatgcaggctctatgtgaaaatgcattcttattggattttaatattgttttattttgattttaaaaataattttgaagatacctacagcatattgtaagtataaatggctcagaagttaatacattttaagatacattttcagaaaattacaggttttttttttttttcttttaagtccacaactaagtttgattgctttaatatcttcctcttaggaagagataagggtaatgggaagttgtagagataagctaaacttataccaacactagtttgagagccattcgattttttttttcttgctattttttggcaacaagaaccgcacacaccagtagcagagtagataatacaaccatttatcaaccttaaagaaccacaagtgttattctttatgctttattactttgcttcagaatattgcctttagactgtgaaattgtacccctgtttatttacgatttttatttaaagatttttttttttgttttggagacaggatctcactccagttgcccaggctggagtacactggcacaatctcggctcactgcagcctttacctcctgggctcaggtgattctcccacctcagcctcccaagtaactgggactttaggcatgccatgcccaaccagtttttttgttgtttgctttttgttttggtatttttagtagagacggggtttcaccatgttgcccaggctagtcttgaactcctggaatcaaacaatctgccttgcttcagcctcccaaagtgttggggttacaggtgtgagctactgtacccggcctaattttatataaagattcttaatctgtctgtctggtttggacttaagctctctgtataataaagtaattgataagatgatatgcagttctggatttatgccagatacatgttttataagaaattttacatggtaattacttaaaatataagattctggtgtattgaaatacgtatttgagtagcctgccattttaaagttataatgcaagttaacttctaaattttaataaaattttgagttttgtgaataccgttttcttcagcaaagctcaagtattaggctattcgtgtaaaactattatatctttgggcacatgtttcttaatatgattttaaaaggaaaaaaagtaggttttaagcaggtcatggtttatgttccagcatttagttaaaaaaaaaagacctctaatcttataatgctgttaatttgctgaacactttatctttgcagatcaatttcacatacttttatctggttcatttttcacagccttgctccgagtgaggtgttcttatcatcagttgacaatgatgggacagagatggctcaaggatgttgggcacccaggggtggttgaactggcagttacgacttgatccaggttatctgatttgggatccagtctgctttctcctaggtcacagaagccttttgattttgtttttcttcttttttaatgttaagacaggtaactgactagggctgcaggtctggcggctgcttgttttgggttggtcttcaaaccctgttgttccctgacatcctgccttcagcacaggttgctgtacagcttttcctgtgggcccagctcctccctccaggggcctttctttgcagaagctgctctttctgcctggaactctgttccctttccttgtttctcttcctttccttcttcgaatttaagcctaattaccctccacgtcagcgcttcctcccaccttccccactgtatactctccaaactccatccacttccctctgcttggaactctttttctgcagtgtatttttgtggcacttgagtggctttgtccttagactaagttctgggaggatgggatcttttgccagttttttacccattgtattctcagccttagcaggatgcctcatacttaagaggtacccacatatttaggtggatggatggatggatgaaagaatgaataatgccgattctttcattatatggactttgtttcctttcttagaccattggaatcagctgatcgtctagcacttggctagatttgaacaaattaggaatcctatgttctgtttagttccaactccaatcaattaaccaatatttattgagtgagaggcagaatgtgaagcgctgtatctctgttgtcttctctgtttctctctcttagcattttttcatgtttacagagcatcaagcatgattcaagtagttgctggaagccgccaggtcaaagtgtgcagagaacaaataccagtatgaggggagctacataaacatatgcacacatattaaacataagctatgtcatctgtagaatttaataaactaggctagatttaaaatctttccctttgatgtgtaatacgtcatggttttgaacattttcagaaaatggggccacttctcagttactccagataaaacttactcttcaaatatgacagcattttcttcaccaatgtattttcttcactcatttttcaaaatccctttattgaccctgggtgccagatgagtgcaagttggggcacccatacaaacccacattttaaacttctttgtttgtttcagggaaggtttgaaatagtgtaaattttctcttagtccaagaataggctatttccagcctgagctatagtaccttgttaaactcagtgaaagctacacctttcaacttcgtaagcttggttgccaaaatgtagttcgtttggaatgaattattagaatatcacacacacacacacacacacatacacacacacacacacacattcaaatgtgattatctactggaaagtcagtagataaatcagttgactagaaagtttatggtttggattatttttgtaatgttatttcatatttcccacccttatattcccctctttgggaatgataatttgagaagttagctatgtattagccttagtaagaaactgtattatgtttatcagagaatgaaacgaaacaaattattcctcctcttttagctactcccctcccccgccccacacacttttaaccagttttaggattttattaattaaatactttgccacatgtctggtcagttggtgtctttgtataagaatggtaccacttcctggtaccaaaacagagatatagatcaatggaacagaacagagccctcagaaataacgccgcatatctacaactatctgatctttgacaaacctgacaaaaacaagaaatggggaaaggattccctatttaataaatggtgctgggaaaactggctagccatatgtagaaagctgaaactggatcccttccttacaccttatacaaaaatcaattcaagatggattaaagacttaaacgttagacctaaaaccataaaaaccctagaagaaaacctaggcagtaccattgaggacataggcatgggcaaggacttcatgtctaaaacaccaaaagcaatggcaacaaaagccaaaattgacaaatgggatctaattaaactaaagagcttctgcacagcaaaagaaactaccatcagagtgaacaggcaacctacaaaatgagagaaaatttttgcaacctactcatctgacaaagggctaatatccagaatctacaatgaactcaaacaaatttacaagaaaaaaacaaacaaccccatcaaaaagtgggcgaaggacatgaacagacacttctcaaaagaagatatttatgcagccaaaaaacacatgaaaaaatgctcatcatcactggccatcagagaaatgcaaatcaaaaccacaatgagataccatctcacaccagttagaatggcaatcattaaaaaggcaggaaacaacaggtgctggagaggatgtggagaaataggaacacttttacactgttggtgggactgtaaactagttcaaccattgtggaagtcagtgtggcgattcctcagggatctagaactagaaataccatttgacccagccatcccattactgggtatatgcccaaaggactataaatcatgctgctataaagacacatgcacacgtatgtttattgcggcattattcacaatagcaaagacttggaaccaacccaaatgtccaacaatgatagactggattaagaaaatgtggcacatatacaccatggaatactatgcagccttaaaaaatgatgagttcatgtcctttgtagggacatggatgaaattggaaatcatcattctcagtaaactatcgcaagaacaaaaaaccaaacaccgcatattctcactcataggtgggaactgaacaatgagatcacatggtcacaggaaggggaatatcacactctggggactgtggtggggtggggggagtggggagggttagcactgggagatatacctaatggtagatgacgagttagtgggtgcagcgcaccagcatggcacatgtatacatatgtaactaacctgcacaatatgcacatggaccctaaaacttaaagtataataataaaaaaaaaagaatggtaccacttcttgctgaacagtatttttatctctttgatgactttcccttgaaccaagaacacactgttttgtagcaggaagatcctataactctatgctgagtatttttgttttttaaaagaagatacataagtactggaggaacacagtgcgttaaacttatcctgaggatagatgttagggtgtgtctaacccatgtctacatttagggtactttgtaaataaagcccataattggtacacatgagtagttagagcagttctaattgcatgaaacctgtctgagagaaggattcattctgttcttggtggttgagaagattataagtgtagggtagagctgtgtgtcatttagaaatgttttgctagggttcagacatgctgcttttctggtgagtggatatagggtgagaggaaaggagctggatttgccctgattcttgggaaaggagagggggttggggattctggctcagggtcgggggttctggctcagagtttgggcattgggagcaatgattaagcagaggagttggcttatggtgttttgtggcgtgcagctgataggccttcatggataggtatgtttcctgtgtagatggtggtcttcagttacagccttgccatggaggaaatctttttaaggtaaacatacaacacagaatttctgaatttcaccgtctgagatagtcttaaggttctcataactaaatgtctatacctagtaagtgcttagaaatatttgttgaataaatgaatggatgtgatttttaaatgaaatgtctctataaattgatatctgtttctgaagcatcttaatgaatcaaagctttggagcaccaattctttccattgtaatcccaacactttgggaggctgaggtgggcagatcatgaggtcagccccaaagaggggaatataagggtgggaaatattaaataacattacaaaaataatccaaaccataaactttctagtcaactgacttatctactgactttccagtagataatcacatttgaatatgtgtgtgtgtgtgtgtctaataattcattccaaacaaactcacagatcatgaatgtaatagtaaactaagtgatgcacggtagtaaagaacctcaatgaaaaatcttaatgcaaatattattttaaaagtcacatttaatttccagattatttcatggattgccagtggaggagctggcttatttttagactgtttttacatgacttaatgtaattggtgagtaattttctgcacagtaatttaatgagtaagtcatctactttatgctcagtctgggctgggtgcttgctctctgggatctccctaaggagtactggtggaaatgaggttgccatatttgacacaagggccgatggtggctgtgtggggtgtgatgacatgagacaagagtgtcaaggcttgaatgtccaaggaggtaaaacttgaggtgaggcttgaaagatttcagattttaacagtgagaggagaaaggaaggaattgctagataatcttcactaacttggagattgaatagtgaagagggtgaccgaccttgttggaggttgtctgttgttaaaaggtggaaatgacatgatgttgtggggccaggcagaggaattgggatttactaaagtaagtagtaataggaaatcactgcagatttctgaagagaagagtgaaactgcagtttaaagaagcttgacttgctatgttcatgagtacttctcatgacactggtataatttgctgcttatatagccatataccagatactgcctccagtaggttttgcttccttccctttttagtggattaccagtgacgatttagtgattcaacctttgtaaatatcaagttttgttttgagttttatacctctgtgagttatagagtgcaagtaggtcttgtagtctccattctctaagaagggaaatgaaactcaagaattcttcagcagaattctaaccaagtgtggaatccatccaggaatagtaagccagcttttctcttccacttactactgaacttcctaatgtgaaatgaattgtctgttttggaacaaaacacctaggctaaatttacatttttgagtttgtattcttgataatttgatcttaaaatgacaaaatatcaataattcatttgcctccttaattgtcaactgattttttaatagctgtaaaatgtaatttacataccattcatccatttaaaaagtgtccaattcaatggtttttagcatatttagagttgtggaaccatcactacaatcaattttagaactttttcatcacctccctgaaaaacctgtgtccattagcagtcacccctacccctaccctgtcattctcaaccctttccagtcctaggctatcactaatctaatttttgtctctatagttcaattggtatctttctaaactagtattttacaaaatgttactctggattttgttatcagaagatggtttcagcctcagcttgctagtactatgaccttgagaaaatttcttaactttgtgaaatttatccccatatctgtagaacatgaatagtcatatcttcacagattattttgacgattaaaggatatttatgtgaaagtgtattaagtgctatatgagttaactgttctaccaaagatatgtaactgaattattttattaaatggtctcattttaatcttttaaaatagttggtggaacataataaaacacataataaatgtttggataggaaaggatggagttttatgtttttaaggcgatggttttattatgtatgtgattttatggtttgacttttaagatggaaggagtttttctgaatttccctggagaacttaatatagttgtacttatattatttttggatcattaaaccctttgagaatctaaggaaagctatgtacatatacttgattttccaaaaaaaaaaaatcaagaggttcatggatctttaaaactatttacacagtccctaataccaggttaagagcccctttatctaaaaagagagatatgccgggcgtgatggctcacgcttgtaatcccaacactttgggaggctgaggtggacgggtcacttgaggtcaggagttcgagaccagcctggccaacatggtgaaaccccatctctactaaaaatacaaaaattagctgggcatagtggcacgcctgtaatcccagctgctcaggaggctgaggcatgagaatcacttgaacccaggaggcggaggttgcaatgagccgagatggcaccactgcactccagcctgggcaacaaagcaagatgctgtctcaaaataataataataatcataataataattaaaagagagacaaaataattcttcaaagccgggccaagtgattccacacattgggaggaagacacagccaatcagcccaaggtatgtttatttactgtccaattttcagtatgttctgttgttcatataaaagtatactcagtatatgcttgctcaagcaagggggattttcttctagctatgagattgtaaatacactatacatagagaagacatgaagacagctcttgaagacaaagctgaggggaggaagaacaggcagccagagtgcctttcatactgtagcaatactctttgggctgcacattttagagcgcttgtataaacaagcattggattcccaaaggccctaggggaatgctgtacaggttgtgtggggcggcctgattgagtttattctccagatggctattactcacaggccacttaataaccactgttgtttatttcattgttgttagatggcccaacagtacagcatccctcagtccatgtaacaaaaatgttcttaccatgtctaaaaagcaaatttcttccttaccaagtctattcccagttgcttcccttaatttgagatgtattattgtggaagaatttggataccagtagtgaaagaatccagctgagaacaaaactcagaggtgctggaaaggggagaaaagaaatgccagttaatggaatggctggatggtcctatcaggtaagagggcagaccacttgccacacaacctttggataacagtcctttgtcaggcatggggtttttgtttgtttgttttgtttttccaaatattttttcctagtctgtgacttgtcttctcatcctcttgacagtgtctttcccagagaagtttttaattataatgcagtctagcttatcaattatttctcctgtggatcatgtgtttggtgttgcatttcaaaagtcatcgccatactcaaggtcattttgatttcccccccattgatcttctaggcattttgtagtttgcctgttacatgtaggtctgtgatccattttgagttaatttttgtgaagagtttttaagatctatgtctagattcattttgtttttgcatgtggatgtcccattgttccagctctatttgttgaaaagacagtcctttctccattgtattgcctttgctcctttgtcaaagatcagtttcctgtatttatgtgggtcttttcaggtccacagcctttcagtgacttaatgctgaaaagaggtggcatctttccctggggctgcctcccctgcttgcccatggcaggatttctgaaggccacagtcagcctgggaagttaggatgccagggagttggcatggagtccctgtgggacttggtagctctggggggcttctgaggaagagactcattgttactggagtgaacgtcagaagctctgcattggtggattagtgagtcctttcctcattttctcctcttgtgcaggcttcttgttcctaatgcactcattctaactgatgagataattacagcaaaattttgtatagctactagaaccaggaattccgtcgacacaattagaattggtaatccttaccttcaaatcttcattctagtgaaacctaaaataaaattagcattgctttcaagcagagcttttgtgcttaaattgccccatttctgttccatatcttaaggctgacctccattccagatttcccatttggggacttggatggttctcctgtggagccaaggtgaatttagtgacaggttagtgactctggtgggggacatgtttgcagtagagctccactcttttttttttcctttcctgacaatatttcctaacttttcgccttcagactatcattttgacgcacatcacccctaatttgttttcgtggctctgtactcctttctctccaattactgttccattgttacagctacctgaaagacattttcccttgacacacgctgtccgtatctcagacacctcagcgaggtgactgtgttgccaagtcttgtcaaaggttccaattttgaaaccttataaatctctcccttgcctgtattcagccttgctgggatcagctgtcttgacagccttccatctggctttcctagcccttcctagcccaccattctaacggccttacttcctgcctccaaaattttcaagagctcccaattttcagggagagtgcgggcttcctaggctagcactcagtgtcttgaatttcctggcttttacataactgtcatctttaattctagcacatcctctcatgctctttgctacctaactaagctgagtgctctcccttccttccatttcctataaatatcttgtacttttccacttttatgtctttgttctcagacttctaagccagtggtcctcaaacttaggaatgtatcagactccacatggaggccttgttatagcagggaacacggggcccaactcccagagtttctgattcattaggtctggggtggggcctgagaatttgagatgctgccggccccagggactgcaccttgagaaccactcttctaaacagttctctaattctaatacgttttggttaaaagaaacatcgaattcattggaggccattggttattcagatctgtgcattggattttacatccaacagtgctaaaattgtgttttgaacataaatgcattttgagctcctgcttggtgccagctgacaggccctttgtccataaaactactgatgaattgaaggttatacttctgtttcctctctgcatgttgggtgaggacacttacatatttagctgtgagccactggcggctacactctgtcattacagaccaacaggccctacagccagtcagctgccaattaacaaactacaggcttgtattctgcaggcagtttagccaagggatgccagcatctctgttgttcctgccgttaccaggcctaggcattgtcttgcagcttggtaactccacctttctaaagactcaggtgtccccagttgtactggtaaaaggttttgcattttagtgttatggttaaatttgggaattaaaaaaatgtaggaatcattcctttgtctcattcacagtgtaattgtcaaccacctgtatcattagtgttggcggggaaaggaggggtgaggagtcactgtggccatggatacatgtcatctgtccaggcctatagcctattaaaggcacttgatttgagtactttcaactttgcagggggatgggatgtccaagggtgaatgtgatttgagtagggcatctggaactttttagaagataatcagtacctaatagattttttaccgcatagatttttcacttctcattgcacttgcattttgctggtgtagaatgcaggccttgaccgtagagttgtgtgggttgcacgtggattagcctcacacagagaggtaaagggtctctaatttaatggacctttgtgaaggattctaaagtaaaagtgtacagagtgctttctgattggcgaatgtacctatgatacgttttatttgggcgtattttcttgttttccttacacacctgtagacttctgatatctgacatgaaataaaactttccaagaaaatacctcaagattccaggttttttcctacagttcagcttacacgtgttatcacatcccataggtaagtgatgaagtctgccgtgccagtgctttgggaaagcaccctgcccaccgttttgggagttgaactttgtgattgtttagaataccagcttttaattgtttgttgttaaattttagtcaatctctgtacattcttcactttgcttcataaactttgataagttagcaatgggatatccctttctgcctaggtatatttattctttaaaaaatgtacattgaggaagggaaagtaatttttaggaaaattacagtgtggtaagcatactgatcactgagaccatcctaaatttgatttttttttttttttgttgagatggggagtgttgctctgtcgccaggctggagtgcagtgtacgatctcggctcactgcaacctccgcctcccgggttcaagcaattcccctgcctcagcctcccgagtagctgggactacaggcgtgcgccaccacacccagctaattttgtttgtattttagtagagacagggtttcaccatgttggccgggatggtctcgatctcctgacctcgtgatctgcccgcctcagcctcccaaagtgctgagattacaggcgtgagccaccgcacccaacccctaaatctgatttaatctttgattcagaagatatctcagagtcttacaggatccatgtacatcttcattttttttcctccatgttgaaatgaatttagtttgagttttaacttaatagggttttggatagaataaatctatatgtatatgtattaggatagagacataataggaagtgtggtgttgggagacagagaattgaaaatctgggaccctagcaacagttgcttcaataactatagtactgaatgtgtggcctttatatctgtgtctcagttttccccgactccagtcatacctgcattacacatagtttgggaaagactgccttccctctgcaaagtccatctgattggaaaggctgggtagataactgcaataaagagattgaatgtaacggcgttcctcctggggatgggaggtgaaggattcagggataggcagtagagtgatcaaagacctggaagttgtagaattcagagttctgcagccagttgacatagctgccttgttaccccacagaagattcatattgttagtgaaaaatatgccaccgagaagacctgggcttgagtcttgcttctttcctgccctgtacaccacgtaccagctgtgtgatcttggggaggaccttagatgaagtccttttcccatctgtaaaatgttggtgatgaccaccatctggtcttcctcacatgggcacagtgagcactcactggaatagtgttcttcctgtcatagatgtaaagcagcaaactgaaagttctggtggtttatcatgattattatacttgttggctgactttctcatgggcttcttagatgtttctcttaaaggcagaattttaatttaaaaatgcatattatgtaagaatattgtagttgactttgagaattcatgaactgaaacacttaaactctctcaggacctctaaatatttcttgactatttcagagcatttgatttgtcctaatgctatggagttataaaaccattaatggtatgatagctctggaaacaaacattaattcatttgaattcattagaatgataaagcatattgtgcaggggttttcaggcattcagttcataactatcgaaatgtggatcataacaaattttgtttgggtgtgttttcatgtctaaagaggatcttatcataactctcatacttattagttttatgtgaaatacaactagcaagcatatatacataacaaaggaaattgcagattgtagtttctctgagattgatctattttattaaattatttttattaaataattttttattttatttttatatttattttattattattaattttttgttataattaagtcattctgaccttataatttgagaagcatgtgccctgttttcatgctttagttttattgtaagcatctatatttagggaggggggtgtggttatgtgtttgtatatgtatgttcaagtatatctttatttttattttatttttgagacagagtcacactctgttgcccaggctggagtgcattggcatgatctcggctcgttgcaacctttgcctctcaagttcaagcgattctctttcctcagcctcccaggtagctgggattacaggcagcaatcaccacgcccggctaatttttgtatttttagtagagatggggtttcgccatgttggccaggctggcctggaactcctcacctcaagtgatccacctgcctcggcttcccaaagtgttgggattacaggcgtgagccactgcgtctggcctatatctttattttttaaagtttacaaggtgatagtttattagtaagcgttcatgccaataacagtttctgttcaaatgtagttaaagcctgacttgaagaattctggtagcgaaaggggaagatttcatacctcttaattgcaatttgaacagaaagtggcatcttatagaagtcttaattttggcatgttttgccattaaaaattttttgaatttcaatagctttagggatacatggtttttggttatatgaattaatcgtgtgtgacgaagtctaggattttagtgcatttgtcacctgaatagtgtccattgtacccaataggtagtttttcatccctcaccctcttctcttccccactctgagtctccagtgtccaccttaccattcagtatgcctttgcacacccgtagcttagctcccacttaagagtaagaacatgtggtatttggtttttgatttctgagttacttcattagaatagtggcccccagttccatccaagttgctgcaaaagacattattttgctcttgttctgccatttttaatctgattaagaatcataagaataatttcgttgtcatagatatttttttgctaaacttatttttatcataaacacctaattattcacccatagtctgagaggtggagtggagtaacacctccgttgagcacctccgttgagcacagtgccaggcactcttagacaatgtgcaggcagttattataactcctgtagaatgcaatggctttatcctcactttttggaagaggaaactccttcaaagtgttgctgtcatttgaacccaggtctgctgcacactagaaggtccgtattttctcccatgcttttgtatagaggcataattactggctctttaccctagtgtatggcagtaaaacaaattcttgcgttttagcatcagtaaacttaaaggagaattgcctcaattttctttgccttctgttacaaagttataggagggttaagctaagtacaccctctttctccagcaaagcctgcgggttttcctctcttcctcagaagttcttaattactgttggcacatcttgtggtgaaagaatataccttgtgggggtggaaaatgaaatgttatctgtaatgagtaagattgttggccaacccaaagagttggtttaaacaaaagtggggaacagcttgaatgaatctgcttttcataggtacttttaacacataaccataacctgtcagacataccaatcgactgtcagttgcttacatgattgttttagtgtctggtggtggagccccaaagctctgtctgtatttgccagacaggcatggtagttggagcgatgtatgtggtcaaagaggtccaaaaacttgcctaagtgaaaacctggaaatggagctcttggttggagttcttgatttataggtagaaataaataccacagaaacagtgccaccctttcttgtatctgcaggtttggagattgtgaactgattaaataactgtaaattgagcatgggtgtgctgaacccagagctggttagtgcagccctgtctaggacataattcaggccaccattttagaagtatgggtctttagtcctaagagaaactaggggaaaagtgaattcattcaataaacatgtattgcttcatggtagggaaacaggtaaatggggaactgttcatctatttgggataggcagatgtaacccagagtgcaatgcaggtgagcagtgtgaagagtaaggaaaagtcactgggtgtcagggaagggaaattacacatggctgctgcttggataagaatggtagataagatagaatgtagaatgctcactgcttcctcctccttgtttttgtgtttgtttttgaaacaaggtcttgctgttttccccaggctagagtacagtggcacaattatggctcactgcagccttgaactcctaggctcaagtgatcctcctctcagcctcccgagtagctaggactgcaggtgcacaccaacacgtccggataatttttaaaatgttttgtagagacagggtctcactacgttgctcaggctggtgttgaactcccggcctcgagccatccttccaccttggccttccaaagtgttgggattacaggcatgagccaccactctcagcctcttcctttttcttatactctcagcctagatatcctttcctccatgaaatgccttccctgactttcaccccagttctaggttaggttctcttactgggccagtgtagagtacagtacaccacacttagcagagtatctacctcctggattaccacagctcttatctctctcctacctgactctaagctcctgtaagagcaagagccttatagagacagtccccagtacatagtaggtacttaaatatttgctaaatgaactaaaatgaagctgtaaaagttggagtccaattgtggagagccttgtaataatactagatgatatttattgagtgcttactatgttttaggcactgtaaaggtacgtggcatatattaactcatttaatttttcagtaacctataaagtaggtaccattgttaatccattttctagttgaagaacctgaggcatgggaagttgggtgtcttctcaaaggtcgttcactttgctccctgcttctggctcctcctgtactgctgggaaatttagagtggctcctggaggcggtggggactgttagtgctataaggggcccggaggtgtgagcacatgtgctctctgggaaaggagtcctgacattgtatgtagatggactacaggaaggggagtcgcttgaagcagtccagagtcacctctgaaatggcaatgcaaaatatattcgtgtgatttgttgatctaacacgcaggatgctaagtgctaggcattgttgaaagtgccttaaatgttaactgatttaatgcttttggcagctgcttgaggtaggcactatcactatcctctccattttatagatgatgagcctgaggtgcagagagatcccgcagctggtaagtggcagagccaggcaagtctggtgccagggtttcagcgactatcccaagctctgcttagtcttcctgtacaaagggaacgataactagtagtctccagtgatgtttttgttccagatagtacaggatcaaagtgatattttggagacagatccttccattttcaaaagcatctgccttaaagacatttgtctagaaatatttatatgattgtatcacacttaatatgtgcttggcttagagcaggcaaaaacaaaaaacaaaaaacccaaagacacaggtcctgcccttggggaactcatactctgctaaggggagatagagaagtatgtagacttacaaagaaaaaaataatttcggctgagaaaggcaaatgaagaaaataaaacaagccaatgaaagagacctgtgcattccactgtgatagccacgaggtgcatgtgtccattgagtacttgaaacatggtcagtcaaaattgagaaatgctctaagggtgaagtacacactggaattcaaacttagtatgaaaaaaatatataaaatatctcaataatttttacattgattatattttaagtgttcatacgttgggttaaatagagcatgttattaaaatgaatgctaagtgaaataagctaggcataaaaggacacttttattgcacttatgaggtaactggaatagtcaagttcatggaggcagaaattagaacagtggttaccgggggaagggagaatagggagttactgtttaatgggtagagtttcagtttgggatgatgaaaggtctagagatggatgtggtaatggttgcacaacggtgtgacgatactgaatgccgctgaactatacacttgaaactagttcaaatggcaaattttaggtatattttactacaactttaaaaagccaaaaaatatgtgtcacacttttaaaaaatgtgactactagaaaattttaaattgcacacgtggcttgcgtcatacttctgttggagtgtgctgggtagagagtaatgggtaagatggtcaggaaaggcctctttggagagggtcacatttgtgtcctatgaaatgagagggaactgaccacacaaaaggcttgagggaagcatttcaggcagaggcagagcggctgcaaaggccctggagtggggaaagtgtgtatgcttagggaggtgggatgaagttaggatggaaaggggcaggtccccgatcaccggggtcttatgggcttgaataccactgctctgcataaaacttgaaaatagaaacaaagcaataaaaaactcaaatttccatacagattaaaccatgcgaaattgctggtattctgacctatttatatgattcagcctaatcttgtgtttgtggttctggggtttgattctttccctagtgatgtacttgtttggctagcagagaaggcactgccttgctttctaattatttgctaattggtgggtaccctaaagacagcaccccctcttgctggcttacataccactttgcctgacaacaaatttgtgttgaaacggaaggaaacccagctgctcacaaactaaaactgtcacaagtaataaaaaatcctgaagacagtaccttgaacattttctatttcataaactttgtctttgtcagcttggtggcttttggaacccagagggagcaataatagtatcattagcgcctttggatcctggcgctgtgaagtcactgggagcatttattattattgcacaggtagacttttctttctggaaaggtcttggctcaggacaagtaaattgaagggttggctttctcagtagggaagggttgttaggaaggtaaattggggtttgtttatccttctgttaaaggccatcagtgctggctcaagcagtctcgtggaggctgctgccaccctgttttttttcccaagtccaccttggtggcctcattgtgtgttactactgcttttcctggagcagggggtctgggacaatgagaggcaaccctacaggaggtgctgcagaatgaattgttttcttagtggtttttgactccagaacccctggtggaaaatgtttgttcatattaaaggagaagatggttaatacctaaaatctttcatcttatggaaagtttttttgggctttgaaacatctctggccacctgctgaggaccagtgagtctggcaagtggtaatgcccactgcctgtgcactggtcttttgtggaggagttctgtgccacatttgaactccccagtcaaatggttctagtggtgtctcaggtggtatgaagcagagaggtgcctgcattcggttctccaggctggcccaagtttaaaagttgactgggtactttgtgctcccttgggatggctagatatttcctcataacctaggtgctgtgtaagctaatttgttaaaaaaaacaacaaaggccccatgttatgtaattattgatatctgaaccacaaaccagaaatctgtgcccagaaaccatcccacaatttctagatttccacccctgcacatatcgtggtccatttctataggatcactgttggtgtcatctttgtttatttactgtccaattttcaactgctataagtcattaactacattagttgaatactttcttaccccaaggaattccttattgcagtaggtttatatgaaggtggggttagctttagacttagctgcagagtcttcatttatttttcagtcctaatcagctttatttgtttattttgttttgttcatgtcaggattggtcagattgttgtgaccaccagcttagttatgacacggaccaggaaaactgtgtgacctccccagagctggcttgagctacaggaataagcactttcttaatgtggggccttgcctgcctgaaagatcagatgcatctgcataaatataaataattacttgtattcttgttttttgttttgttgtttacagtttacatgaactatttcacgttttttctctttaatcttcatgtgaaatttgggagatgggcacaattattgtctcattttatagacagaaaaactcaacctcaaagttttagtccaggtgtctgacttcaggatggatgctcttcgcagacctcccaacaacaatgttgcctgaccttctggcaagtttccaagagtgccaggaccccaaattagaaacctgggtgctgtgcttacacttcatgtgtgggtgatgaaggggaaaccatgggattgctaaggctcaggttccaccgttgcaaaatggggctaatacctgcggcgttggatgctgggaggattttgaggtcttatccatgtaaagtgataacagcacctgacacacaattgctctacgaggacagcagcgactattgtcatttaaagaaataaatcatcatatcctctcacttacccttcattcaataagttggcaagacctgtagattttacttactttaataccattgactctgccctggctttctaatccttctggtttggcacttcttacacaattcccgccataattggatggatcacactgcctccagtcaagcccctctaatctgtcatctgcactacatccagcctgatctttccaaacacagttttgaccttctccttgaacatccctcatttgcttacagaagaaatataaatctcctagtttttcaccaaagattctttataatctgaccctcttcttagtcttatttcacctatcccgaacacacaccctaccctttatcacacagaactaaaactcctctcttttctcatcctgtcttggtgccctaaatgcccgcattccgtgtgcctcatttgaccctattctccccctgccctctgcaccccctcccctccacaccccctcccctctgcatagctagcaccaactcaccttcagctttgggatcttagcaccgtgcacacaccctgcacggtgctcagtgaataaatgaattaactcttggtgtaagtggatacagtagccagcatctttagcctagggggtctcgcaagtctctagcctttctaaggggttggcaaggctggacacagactagatcttcatggggaaaccctgggatggcagcagagccacctgaagacctggagtgtgcacctgggatctgaggggaagagaaagaagtgagatcacagtcaccaaaacatctgctttatcagcagcaaaaaagcctacctgtggttgatctgaattcaaatatatgccagcagcagctgtctcatcagaaacttatctagagctgtcatttggctatttagaatttaaaccacaattgcttcctaaatattctctgcagaagtaactgcccttccccaccaagcaacaaccaggcaagatcagttatctgtggttaccaggtacaaaatctccattagctgaaataacagccaggcctgctatctgtgtggtctgcaggaccttgttctctgtggtaggaattacacctgttcacagtcatttgactgctttctactgaaggtgttaaagtgctaggcttgtcttactgttgttctgtgaaaaagacatttaatgcctcctatctttattttatgttttatgtctttggaaaaatggaagaactatggaaaatgtattgcgttacctgtaggttctagaccagtggtccccaacctgcttggcactagggactggctttgtgaaagacagtttttccactgaccgagggcaggggtgggggatggtttcgggatgattcaagcgcagtacatttatcattagattctcacaaggagcgtgcaacctagatccctcacatgtgcagttcacaatagggttcgtgctcctatgagaatctaatgccgccactgatctgacaggaggcggagctcaggtggtaatgctcactggcggctcacctctgctgtgcagcctggttcctaacaggccacggatcggtattggtctgtggcctgggggttgggaacccctgttctagacaaccagaaatctaagcctttctccttcatgaaaactgtagagatgcagagccttctaaatatgtttcctgagtgagcactggcatctctttgacttcagtgctcagatacacaggtaacgaatgaaaaaacctgaaagaattgtgagatccacctggtaggtgtcttgtaaatacctgtaattgcaaacctgcggggtggtgggggtagggtggggtagggtggggtggtggcggggagagtttctgagattcaggttactctctttatgtttgttttagtcaacttttcactgaagtataacacaatcagaaaagtacacagatcataagtgtacagtttgaattttcaagtcatccttttaatatattaatatacaatacatgaataatttatgtattcatgccacgaacaatttctttctttaattaaattaaggggttggtgaggatggcagtaggagccaagttctgagttctgttctgttgacataactgttgaatcacttccccccactcacttgttcaaggaggcaaggttttgtttcctgggggtaatatctaagccattcacagcctgaaatgtttacctctaattttgtttctttagctatctgaatacgtgaattccattaaaaccacacacatagaaaaatgatttctgttctgcatgtcagattttttgttttcccaatgaaagtgcaccaaagagtttgcaagtagctctgataaggaagttccttactgtgactggatttgttttctgcccttataaagatgcctctcttacctgcttttctgtcttcccccttaccgttgtcaaagaaaccttttccctttagggccctagcttatctgtcaagttcatagctgtcttttctcctagaatattatgtggttaccaccctccccgatccccacacacaaatacatcatgcagtcttttgtgggcccaatttatttaagtcagctaactacaggctagtataatttttagcagatttcacctcattcttgtacctggtatgaaggcggtactttctggtcccattagtgattaataccagctctggtgtcacctgaagttttttcagctggagttaccctactgccttccaacttttaaattatgaatttgcagatacacagagaacttgaaagcataggacaatattctccacataagttcaataattggtagtttgtttttgttttgttttgtttttttttaccagatttgctttattattctctttttttttttttttttttttgagacggagtctcgctctgtcgcccaggctggagtgcagtggcgggacctcggctcactgcaagctccgcctcccggattcatgccattctcctgcctcagcctcccaagtagctgggactacaggcgcccgccactacgcccggctaattttttgtatttttagtagagacggggtttcaccgttttagccgggatggtctcgatctcctgacctcgtgatccgcccgcctcggcctcccaaagtgttgggattacaggcgtgagccaccgcgcccggcctattctctttatatacagcttttttttgttgtttggttgtaccattgacagtaaatttcagtgatcaggatacttgacccctgaggattcagcatttatcccctgggaaaaaggagaaaacacaatctcacctaagaaagttaatggtgaatacatttctaatattcaacccatatttacatttctcagttgtcccaagaatgtattgagatgtagtagacttttaatcctctgcagtttattaatacatcagagaaatcccagtgattgtgctggctaggtggatggaacggtggtgcaactcattatttaatacttgtacacaaatgagctattttcctagagaagactgaactttccatatctgttgctggcatcttgctttcttgcttgatggaacagtgtaggcaagaatgaatgaatgagaatgaatgtataatacccattacaactgtaaatgggctacttataacttccagaagtccaggaatgtgtcgtttatttgctgaagctaattgagtctgataccagagagatgaggcagctaggtacatacatcattaacaaacaagaaccatctcttgtgtgattcatctaaaacctggtttcactgtagaagggatggttggtcagggcagaatatatggacaggcctcaggagttctccaggtatttgtctttttgatcatgaatagactattttttcggtagagtcttagatttatcaaataattgagcagatagaacattgtgttccatataccccccatgcattcccccatttcacctcttactgtatactaacatatcttgtattagtgtggcacatttattgggattaatgaaccaacattgatacattattactagctgtagtccatagtttacattaaggtttacaccttgtattatacacttacatgagttttgacaaatgcataatgtcgtgtatctactattatattatcatacagaataatttcactgccctaaaaataccctgtgctccacctatttgcccaccccctcttcccctgaacccctggcaactgctcatctttgtattgtctctgtagttatgcctttccaacatgttgtgtatttggaatcatacagtatggagcctcttcagattggctcctttcacttagcgatgtgccttttaagttccttcatgtctttttgatggcttgatagctcatatctttttatcgccaataatattccattgtgtggctgtactctagtttgtctatccatgcatgaagcttactgttttacacaaatgataggacatttcagcacatagcagttgtttgataaatagtcattaaatgacctagttagatggactgcttaatttttctgccagatatgtagtgccaagggagagttgtgatggaaaaggcaattatgttgttaggcactgacttctgttaatgtacagttaatgtttaagtggcttagcccagcaaaggtaggtggctttgatgtgtccaggcttccaacagcagtttcttaaattctctttagagctgcactgtccagtatggtagccactagaaaagtctggaaaaatagccacatgtgtctatttgaacttaaattgattgaaaagtaaataagatgaaaaattcagtaccttggttgtactagccacatatcagcgactcaatagccatatgtggctatttgctgttatttcggacagtgcagatgtagaacatttccatcatcacagattttattagacagccctaatgcaaataaaagcattcagagagaaggatgggattgaaattagttgaccaggctgattctggtttctctttaatgcttagctcttttgtgccacaattttacaatggaagagatgaagctcagaggtctgtttgctgaagaacagttgcttaagatgactttggggataaaaaggctgccaggccagtgaagctgtgaaatgccccctgtgtgacagccccaggcggcatggcttgacaatggtttaggcccttgatcagctagtgttaaggagttttacagaactctcagctcttgcttatttagtttggtgttgaaaaaataaagaaagaaagaaaagaaaaagcaggggccttctctaatttgaggggatgatggggtgggtgtggaaagggaattaaacttcccaactaataaatttggaaattgtacacccatttcctcagtaaactcctgcggttgttggataccaggaatgtgaaacctgaatgcgtatcagacacttgccacaggaattgtagctcagtcccttgtaactgcaattgctcttatttgggagcaaagcaaatagcagttaagtttttttgtgttttgtttctttgccagcacttcggatttgatcagatctaatttcattcacgtggtaggtgccacgctgacaataaagcattatgggctgtcagtctacttagatttcaattctgtattcgttttatgtatggcattttaataaagtcttaattttttttcttctaaacagataacagactagattatgttgtgctttcctttaatgtctaatctggaaattggctgttgatgctagtgagggtttttaatataagttttaaatgaaaatgccaaattgctttgtctgtgcattgtagctttttaaatattgactttgtgccttttgaaatgcttgagtttctaagaggcctagcgtgaaaaggcaaacttgacagaataatatatctaccataattcctgtgaaaagacttaaaatattctggtatttggaagttcagtcaggatgtgaccacttggaaccatgactgtctataaacacaggcttagaattgatacttttctctaagaataggcacagagaaaatagtatattatcttgcaaattaaaaattggaaatgccagatctcaaatgaagacagagttttcctcaatctttaagctattgtcatctgctaaagaactcttataagagttgcagagttttaatcagtatttaacaattattgaatttgttcaactggcatttgttttaaacaaacatgttgtctcttacatgaaaggcaggataacgtatggctttcttttatctgctacaatttttctgtaatttttgaatataacattttaatttagatactgtttcatgttagcaaagtctagaaaaattgattatagtttcttagcatgggattgttttcttaaaagccgtgaaagggaaaagaatcaatattagggctttccgaatggcagctttttacagagcccccccagcacgattgattatagctgcttttgtaaaggatttaaaaagaacaatctgtattaaaaacatcattctttggtatgagctttaacagctctaaatgggttaccatgggggctgcgctgcaatgtgaccacttgaacggattgtggtcatcaccggtgggccagggcagcgaggcaggggaaaggctcttaggtgaggcattgctggcatgcatgccaaagaggttaccgtggcagctgcaatcattcagccgcattctttagcctccaaagcaggaggggcaagaagcgtgtcatttttctacaggcagagtgtaaggttaagcagcaggaagggagagtcagaggatgtctttgttccagagcatttgccaaagccaggtatgtccagtcaaagggataatgcaaccgatagctcccaagcctccatatcctcagctgttgcttgttgccactgaggggtggacatgttttcatttggcatcttacatgtgagcatcatgactacagactcatcttataccaattaaataataaactccactctgtgggcagaggttctgtctggaggtgagtgtgcctgaagcagttaaatctattaaatattagaaacattggtcccatcctcacagggcatgggacagggcccaagcaagagaccattaatgtggactgggcttccagagtttaactcagtaagactctgtgggctctagaaaattcaaatgtaacaggtagtccaggtgctttcattctaaaagagggagcggggtgctcattgccattggctactttacagaaggcatttatttgcaggaatggggtaccctattaatttgggaagaattgaatatcctagagagtatggggatttttataaaatagtgttgaatttagcatcacttttcatttagcacccctgggtgccaaatcccacaggggcctctgtagtatggcttgcctcagaactagtagaatcagctttttttattcctggactaacttggagaaaaaaaattcctgagatgatctatttttaattcctaactgttttgcttttcttcgtcttccatatttttagaaaatgaaatgttatatctcttatgaaatggtacttacacatgtgtgttccaactgagacttttaattgtcactagtaaattactataaatcagcctcattcgggggcaaaaaataataatatgtgttcttgttttaaacgtattctcaaaagtgcttcttaagtagtattttttaattaagcatgtaattttatcattttgcaaattcgcttttacctttcatcctgtgcgaccctgatatcataagaataagagtactatatgagggctgggcatggtggctcacgcctgtaatcccagcactttgagaggctgaggcgggcagatcacttgagggttaggagttcgagaccaacctggccaacatggtgaaaccccgtctctactaaaaatacaaaaattagctgggcatagagttgcacatgcctgtaatcccagctacttgagaggctgagacaggagaatctcttgaacctgggaggcagaggttgcagtgagccgagattgcaccactgcactccagcctgggcgacagagcgagactctgtctcttaaaaaaaaaaaaaggtaaaagagtactatatgattctgtcagcaggatgctggaatgtcttcatatatagattctgatggaggtagattagaaagacagaaggcagcacgggagtggattaggttaccttttggatttttgagggctttggccacgtgtcagtttgtacagctgatgaagtatttgtcattggtgaaaaaaaaattactgtccacaggtttcctttccctcttattgggcaagaacctgaatgtcttcttcagagaaagtactcatatacagcacttcagcacaccaacaggagtcctttctaaaatgcgtttgctttgagatggcacaggtcacgtgatcatcagtatactctgcgtgaagcatgtcagtttgaccgggagctaatgcttctgccccaactgccatggtgcagctcggggaaggcttcatttcctggggaatttcatgcattttctgtgatggatttcataatgggctctaatacctttaaatattttcctggttcttctgtcaagcaaaccatttctttaaaagttgcttggttggccattatcatttattttacttggttaaaaattttggccaggaacagttcctttatatacaaaaataaatacagaacccagggctatgagtcttgggcagaatcaggctgttttcccagtagatatcaggaatatgaataatctctttgacacacagtgcagccaccctggtgacttggtgctaggtattaaaaaccctaccgttcagaacagtttcttttaacttcagctttgaaattggtggtctcgtcagctttagatttattccttcttttttagctttcttgcttttgtttagatttttaaatttttaagagagtctttgaaagtgctgacacattttcaggctcccagtataaggaaccaactgcaagtgtcattttcttcatttaaaaagtcctcctagatcaggtcactgtgtccacttataggctttcctgtaatcagcagaaggagaggctgccattacaaacaggtgagttaggtgtaatagattggacgcagaaaaccaggagcagtatggaacatctgcccagctcactggcatgtcagccctgcaggtgtgtcggaggcacagggctcaagtgcaggcatctccctcctctggttggggctaagctggaagggagcttgtatgctgggaaacggagcaagctcaccttgacatggagtggcttcctccacttgaaataacccaggagcaaggaggcgctaacaagacgggttattagacccaggaatttttaaaacctgaaatcttgcaactgaatatccattttattagaccttttgcctttgtgaccacaggtgaaatggatcaggagtggcccaagcactgttctgtgagttggcatttttctgaagtgtgattttttttttttttttttttttagtacttacatacttccataatatttgcttcttttcttaaaaaaatcttttgtagagatgagatcttactatgttgccctggctgatcttgaactcctgagctcaagcagttctccagccttggcctcccaaagtgctgggattacaagcatgagtcactgcacccagctcatgacacttgctttagatttatatataatatatatatgtaatatacaatatatatgatatatgtaatatatatattatatatcacatataaaatatatattatatatattatatatcatatataaaatatatatgacatatgtgtgtgtgtgtgtgtgtgtcttgtgtttggatgtattcgctgttaattaattttcaaaagtttatttgcacagttgatgtctgaaagctggttccaagtcatttgtgtctatgacttatcggtcttgtgctttctgtgctttcagcaacattatagtgccaaaaatgtagctgtaatatcaattaggaaaaaaattacacataaatccaccaccctaaccagttatctttcttcttcattttctattccctttcagtgcttggccaaatatatatatgtatttgaaatatatgtgtgtgtgtgtgtgtgtgtgtgtgtgtgtgtatatatatatatgagaaattgcaatatagttgtaatattagaaaaaaattaatgtatgctttttaaatttaatatgtcgttacaaacacttttacttattactatgtggtatatgatttttaatggctatgttgagaaaactaatatatcatgcataattatttaccagacatagtacacccctgtagtgggcattgagattgtctccctgatttgtctttaatgcagtagtaaacaccctaacttttatttcattaggataattcctgggagaagaaacatctggtcaaatagtataaaagatttcatagcttcttaaaacacattgccaatgtgatttccaaagggtctgtgccaatttctgttagttggcatcttttaaatagtcaaggcttctttttacaggccagcagcagagtgttccatattcctattgacattcagactcagttctagctcagacctctgaaacacttggaaattctatccattgactgtggcaagtctcagaactcagattctttctccagcctgagctgaagcctggaaaggtgtggtctgccctttggccccaaggtctttcccatttttctgtcctgtaagctttctgtggcattctgtcagcccttgtatagggaggagaatatatgtggttatgccttggggcctagaattgtagcagttgaaaaacccttaaagtgaattattaaatctaaaccagagcctgttggcttcctgtgcttgacttggactctgttccattatggtagtttttacaaacacttctgaatacgaaataaattccaaatatttttccccctttctcctgccaaactccgccaggaaacagaatctcattacttcagttagaatttattaatgctgaccctctccagcacttggagcttttcaggttaggctcacacagcttctgtttttactctagtctaaactgtggtcatatggatagcaaaataaatactagaatattctagtttgggaaggggagaggcagcgatgcctgtaataacatggctgcaaacctctcgcttctctctgtttgatattccaaaaaaggaagaaagctcaatgcggagcacatctgtaagtcatgaacattttccttttgtgtgtcatgcatattcaacataatcccactcaaagtcccaggcgttgctttagtatacattgcctcatacatccctactgttgttgccagaaaatttaattcaagacaaaggttgcttcccttctgtctctggatcaggaatctgaacccattaccacaaacagaagtaagaattgtcagtgtgttctgctttgcttttattttgtttttttcccccagttgccttttatccttgtggctgaggaggaagatttcttgttcgtttatttgtttttagtgtaagcaatacaccagtttcatgaagtgtatttttaaaaaacgtattgatgggattttgtaatgcaagtgttttgaaattcaaaagcaacaaaagggcataatgtgaacattctctccaggtgggatatttggcttttaattagttgtctctgtaattattttgattaaaaatgtacgaaatgtgtcaagagtttgggtgaaaaggtttagtttccttttagctggttttattcagttaagagttcatcatgagatgatggcttggaacacctgagggttcggatgacatgagtttgtagaatgatatgccagtgatacgatgactgggaggtgagcatagactcagtgagtgtgtgtacccagggctgctcattgttgccaagctttagattgaagagaaatgagaaggatgggggcgggtgcatcctgttttatgtgttgtgatgcttggggacaggggaaggggacatcattcagttaaataagcatatgagatctttctggatcatcatatctgagatgctgttttaaatttacccaacaaaccacttactgcactaggtactgttctgtagaatgaataagcaaacactgtaggaagaaaaattgttttacaccaccagatgccccaacgtacatacagcaaggaccctttctgaaaatgatattgattatattgaatcatgactacaagtttagatgtgccaagtaatcctctggcaagaggtttttttttttttttttttttttttggttggtgggggtcgcagttaatgtactgattattgcgctgagcattttatgaaacagattttacttggagctttgttggcttaggaaatctaactgctctgaagcaagtttagttcttttttcaaacaaaagaggagaatttctgcagttaagtaccctaacttggtgttactttttaacacactcctcagccatttaaatgttttccaaagaccagagccatgcctggctcattggaggccttcttcatgagcccaaggtttcttccaaggtcacatttaccttttctggcagttcccctcagaataaggccgaattccagctttttaaaaaagagaccatgtaagagaacattgatctgtttttctcagttgtggggtaaccaggtagtttctttaaagggcttggttatttcctttcaccaaatggcgtaaagcttggattcagccccttagaaaaaagggtttcttctactttctgtggagcctttaccatatattggttcctagaacacaacggcggtcaagggagaggacgcagaaagatcaggctcaggcctgggtcttgggcatcttcaaggaactcgctttctcagtggtataagaagagccccactctataagaggcatccaacaggaacagccaacatcagtggcaccttccaagtaagtggttcagacttcaaggactgtgaataattacagtaggaattctgtcatctcccagaccttgggtcatttcagaagcttcatggaactagaggaatttctccaaagttgcctattacctgacatctttatgaccagcccagtcatccttgtgcctcccactttccacccaaatgtgattctaccttcatgtaacctgattatttttttggctttgggtttgttttcctaatacgcatgagtaaatcatttaaattcattcccactctgtggaagggatgttgaagtgtttcttaaagagactttagctttctatataatgaattaagaactatttaagatgtttgaagcagtttggaactgaagacccttctttttttcttttttgtttttgagatggagtctggctctgtcacctaggctggagtgctgtggcgcaatctcggctcactgcaacctccgtctcctgggttcaagcgattctcctgcctcggcctcccaagtagctgggataacaggcacctgctaccacgcctggctaattttttgtatttttagtagagacggggtttcaccgtcttggccaggctggtctcaaactcctgacctcaggtgatctgcctgccttggcctcccaaagtgctgaggttataggtgtgagccactgtgtccagcctaaagacctttcttaagaatttcttatgtagggagggttaagaattttctttcatgtgtgacctcacttttgattttggcttttttccatggatggtttgtatgtatatacaggataataaggtaagcctaggaaattgctacatactagttagttctctgtaaacaaacccttaaagtaagtgctagtaaagacaacagtatgtgcttataagtcagccatatctaacatattcaagggcaagatcatctttttcccacagtaaacaaagggctctttccttctgttacatttttagtttgcatgggtcacctgcttgttagaattggcgttactaaaaattaatgaatgacaattggtgtacatggctccaggcatcttccatgtaggaaatttgaggggcattaggcagagaagtaactgttaagccagaactcaaaactctcagtgcaattttttccccatctatgatgccaagaatactagttctgaaagatgttaaatcgatattctggggggagaatttccatgatcaaagtttgaaaatgctggattaagccaagttcaacacagctctttattgtagttcttccccagtcctttattattattatgtgtgaatcacaggaaaagggagggacgaggtaggcagcatgttgaacatgctcagtgacatacattttgaggtcccaagtccctacttttggagctgtatgatttcaggcaacaatctcctgggtaggccctggagattgttgagatgattagatgagccaatgcttaataaaatgctaagcacaaaatgcctggcacgtaataaacacctaacagccacagctaatccttttgaacccgaggctgaatggtctgatgtcactcatgttgtggggcatgacagtgcagcagaaagagcccacacttaggtgtcaagagcttcgggctccagtttggccaccagctagaccagaggacttttgagctactttgctactctggtgttctgtttcttcatttgtgaaataaatcagtgatcttggtgactatagtgtccagtcaagctctaaaattgtatgttcctttgggctagacctaagccagaattgacaagtttagcttaaggacaggtatatcatctctgagtgactgtgtgggtgacataaatttttagctaattattatttcctttacaatgtgtgttgctagtaataaaatagtttactgagtcacctatggaaagataagctacagttatagcctttttggcactttgtaatcatcataaaagttaatatacatttgagtcataattggagttggactgcctttaccgtaaaacaggaggcatcatctagatgtttgttgtctgtgatgtgatacagaaatgtattattaggccacatggatattttatttttatgttcaaaggctaattttctgaaagttgggtctgggagtctgagttatccataattaagttttctaccttctgctttcgttgttaacctgagttaaaaccataaagtaaattcgacatttactaatttgagctttaattattttgaccactgtgttggttgcactggttgaaagcatgtgcaggacctctgcttagtaggtaaggcgttgtgttttttaaacaaggctttgaatttctaaataacagatttccacactggcagtttgaaacatggtatttgttcagtgtaggttttacctacatgagaaaaatcaaacaaatagatttgttcagttgctatcctacaaattgtcttcgctgagaaaatggacaggtttgtgatgtttctgactacatcaagactctactacacttgatcttttgtgtattgaattaacacttgttcttgtcatttttattacaactaccgtataagtttgggctgaatcattttatcaaactctaaatttttatcatcaaatgtggaaggcctaaatcaccatcgctgtcctcaattttccaacctaaaggtgtttatttcctcttaggggtataatacgaaggaaagtagtgtcaccagatctcttcttggtgtttttgtattggtgcctggggtttgggtagaggaagcagcagcagcagctgagactagaactgcagctgaggccacttggtaaagaacttttttccaggctaaggacttttgttttgtttgtttgtttgtttgtttgtttgttgtttgttttttgagacagagtctccttgctctgtctcccaggctggagtacagtggcgcagtcttggctcactgcagcctctgcctcccaggttcaagtgattctcctgcctcagccttgcgagtagctgggattacaggcacctgccaccacacccgcctaatttttgtaatttttggtaaaggagtttcaccatgttggccaggctggtctcaaactcctgacctcaggtgatccgcccgccttggcctcccaaagtgctgggattacaggcgtgagccactgtgctaggcccaactaaggagtttttatgtcatcctctatgtggcagggagccaataaaggcaggagagtgatacgatgatgtttgagttcaagaacagtccctctgcatcgaatggcttcaaagacacggacgtgggcagtgacaaggtcaggaggccttagtccaggtccaggcccaacatgatgagttagccagagccggggggccagaggcaaaggggtggagataggagacaagtatgtatcttgccttccttctaggcattgtgggtttacacaactgaatcagatgcgcattctcctctgggaatttcatctatggaggcagtgtagtgcttcagtttccctggctgaatgtggcattacgcagaaccctctatctgtctgccgcacattttcctcttggtcgtaccttgttgctttccacagccttcctttgctctcctgtattcacatcttgcatcagccaaaagggaaaggtctgaaagaccagctttgtttttctcccagcttgtactctggaccctgttagccaacagtattggcactgcctcacagcgatggtcagtcccaaattaaacagcctcgttatgacaccctacagccaggctgcagctctggacttgtgcttctgcacgtttccttccagttgctttcgtccagcgtctcggtcccattgagtaagggagtgtgtgcagagtatgtcccgaggttttctcctcagtcaagcagactacatttcgccaggtgtaaaatcggtagtttcgaattcaccccttttcatggccttgaggagatgcttgtctccttgtcccaagggaatattggtgcataaatcatttcccgtcctaggcatgttcattccagaaacctttcagaacagagtgtggagtcttcataaaaggaatttgtcatgagcgcaggggtttttttttattttttattttttaaaggggaaggcaatagaggtattcattatctgctacagagtgaaaagggccctgctttatgttaaattggacttcatggaaagatattggtaatttctcctatgttctttgtgctcctgaaatcagagtgggagagaactttgatttcaaaattattttcaccaccctggatcacagagaaacacacttttggctgcctttaaacacattaaacatctggtcagcccagagaccacccgggagccctgtagaccccaagtaactgagtggctgagggtaagccagcttctctagacacaccctgacttccaccccaagtcttgttgaaatacaggcctgacggctgtcccaggaagtcagttggcttgtcagactgccagtgtggttgaacggtgaggtggctagaattctctgggaggcatttttggcccatctgcctggtagcatgacagatgtgttagtccagacaactgggtcatcgaatgaattgaaattcaatttacacatagggattaagtatctcagtattacccttgccacatcaaacttcattgacagagccaagaggaaaatgaaagtcattcaatgttaagaaaagggaaacaagattctaacatggaaagggaatattttgcttacttttaagactgtaggttacttaaatagatgcaatgcaagctataggaggtttggggcagatggtctcctaggcttaaaatggagagattttaaactacgaggatcctggaggtcttgtgacatgtaactctgaaacctcagtccaaggccaatttggtttaagtaatctcagtcaaatatttattttgtggccatgcattttgagagggacagagaacacaggtcattcaaaacatgccttcaatgagttgtactctgctgaggggcaagaaaaatgcacatgaaacaatgaaaagtaacagtgagggtttatgtcttaaactgttcatatgctacaaaatcctaaaatagtactttataattaggaggtgtataaggagtggagaagtcacagcctgtttcatagtagccaggatttgagagaagaaaccaggaggtcctccaggggaagtaaatgggacaaagtttaagacaagcaggacggagaatggctttttcatgggagcacgaatggtggttcaacccaagcggtgtttactgagcatctactatatgccaggcactgtgactgggggagggaagccttgcctttaaaggagctgagagcctaagaggaggcagttgatgatagagctgtagaacacagggctcctgacacagttcacaagctttgggaattacaatctggaatggtgatagccttggaaaccagtgaaacagggtggcgtcagattgcagagttaagctctgaccattctactagaaaagttgcagcacactcttggctcagggtggtccaggccactggaacaccagtccctaaggtttcagttctcagaatccaccagtgtgatagctcaaacaaaatagattcccatgctttgctttcagttggcactgaggcctggtggagaatgtgggctcaggtttaaagtgctttagccttgctagccagctgctgaaacctgagaaaataaagtggtactgttacagagggttggacctgtcctcttaggaaggttccaatcacagcgactgctggaagagaaaattttattttaagattaaatctaatgaaagccagtgtagtaagggaaacattattttataatttctgttaagagcaaacattctatatgatttttaaaaatagagcaataatgagtgttgcctgtttccaaacaagcgttgtttaaaagctgcctgtctgctttattatttttttcctgggcttttgcgagataatggtagtaaaatatcaatttactaaaaccattttttaaagtcttatacctctactctgtctccagttcatgcaagttcttcttttggcaggattaggttgaattttaatactaaactcttactgaagagttaagaagctgtggaactggtatacttagtgactgatccctctccatattaagcgtgtgatttgctattaccagttgccagtaatagaaaaagaatgtgctcgtgtgggtttatctgtatttgtcattaaggctttgctaagccaatgagccctagaagcaggcgtgcagtgggctttctccctgtcaggtgagcctcacgggcgctgctcctctccgggcactgtggctggcctcagcacaggtctgggctggggtagaaaggcctgcatggcctgaggacccaggtgactggggatctctcatctgtagcggtaaagttctgagtattgccaggcctgcaagcactggtaggatttgatggatccctgggtgattatttagcctaagctaagccgtaatacctttgcatacatccccaagaaagtcctaagtgttttgttccctttccagtaagggagtgacaaagagaatgcccaagatggcttataactagcattgggatggctgaaagtcaggtaagtttagtggaatgcaacaaaataagcccaagataggagtttagatctccgaaatgttttcattctactggtttaagctgtgtaggcttcccttgcaggttattagtccgtgctcacctctcaaattgctgttaagttgtcagggtgcctgaggaagactgtggccagagatgtggattcagactactgtgggagtgggaggggtagtcactgcagtatgtacctgaacaatcagatatacaagtgtgtttcttaatctctcaacatcctgactcccttgtctttcctttctcagagagcagagctgacatctgataaagacatgtaccttgacaacagctccattgaagaagcttcaggagtgtatcctattgatgacgatgactacgcttctgcgtctggctcgggtaaggtggctgcttctaaacactggacctcattctccaggcatgcacgcacacacattttactgtgcttacttcaaggagacaggcaggatgcacagtggttaagggcaccgtctttggaatcaaagggcctgggtgctaattctagctctctctgccacttacgctgtgagatcttgagaatttatttgctgagcctcagtttcctcctttataaaatggaaagtaacaatagtccttaccatagagttgttgtgaggattaaaagggagttgacacatctaaagctcttagatttgggggcttggcacatagtgctctgtcaacattagcttttaatcgtattaagactttcagagtgatgtcatggaaaccacccttcaagaaatccctcaaacactggtttcataaaaccacctaccctatgttaaaaattgtagatgagaccaagaagttaatacgtttttattcctagggtattgtaggaggaaaatgcagcagccaagtaaaatgattatgtagtgacatgatcagattccttagtatattattccttaatagttatctgttaccactctaaggctacataataaaccaccccaaaacttggtggcttaaagtaacagtcattcatttaacttattattctgtaggttggtgatgtaggctgggctggctgggctccctcacatgtcagtggtcagctgccggttgagtgtacagctttaggttgggtttgcagctttcgggtactcatatccctggggcagctgagcagacttgggttctgttcgtgtggtctctcattctccagtaggcaagctattttttcacagtaacagcaagtagaagtgtgcaaagcctcttgcagccaggccttagaactgggcacagcatcacttttactacattttactggttgaagcaagtcagaaggccagaacagactccacctcttagtgaaaggattcataaagtcacatttacagaggatatgtatacacggaggattaagggattctggtcacatttacaatctaccataattgatgaatatttcccctgttctcagaatggcccctgtatgagttcattctcaccctgctaacaacacagggactgggtaatttataaaagaaaagaggtttagttgactcacagttcagcatgcctggggaggtctcaggaaacttacagtcatggcagaaggggaaacaaacatgtacttcttcacatggtggcagcagggagaagtatgagtgaagaggggataagccccttatgaaaccatcagatctcatgagaactcactgtcatgagaacagcatgagggtaactactcccatgagtcagtgatctcccaccagctccctcccatgacatgtggggattatgggaactacaatttaagatgagatttgggtggggacacagccaaaccatatcaacccccaagaagctcaaaaaagggaagagctttccacatacttaattaatagtcaagtgagaaatttgtggtcagcagcatggtaggcaagacttatccagaccttttttgctttagggtttttataacagattcaacagattgttagatatctatgttcggtataacttttgtgatcagattgagctgggcttcagaatgacccagaacagattaaaatcagttgtgtctttggtagaaatctagccatgtaagagtgaatgttttaagttgaaaagcagaaagtctgagaaagacaagagaggtggttgctgacctagtaacaatgagcttacaatgcagtcctaatgtaaaaataactctagttattcttgggagagtgatatatatcacacacacaaaatgggtgtgaaaagagttgttcttattgcccacaactctataaatatctttcactcatggcacctcttttttttttttagcaccttaagagttctttgtaactgtcatcttcaatatgtcccaggaaataataactatggacattttttgttcctacttcgcagatcttagaatccaagagttgttagtggggtgtacaggttggcgaagtcattttgctgatttgctaaggttgaccttaagtctagtttaaagaaaccagtatgcttaaagtaagttttctttaaattaaacttaaggacagtcttagcaaatcaacacaatgactttgccaacctctacagaccccctgcccccatccaggtaaaagagagttagggagggtcatttgaagtcctgaacccactgatcagatagatcaagctgagggttaaacctgggcccacactgctggtgccatggccctagccttaggcagatcactgctgtgaagaagtgaaagagcttcgttcttgactttggaaaccaccttacactgagctgggagtgttgtttttcagcatgaagcagcagtacttgtaactaaaatttgtgaagcttttaactgtgtcagaaactactctaacccctataacatctctgaaacgatagattctgttagtatttcgatgattcccacgagaaaacctgaggcacagagagattcacttgcctcaggtcacactattagaaggtaatagaactgggatagtgagaaagtgagggagttgggcgtgagagtgtgttttctttcattcctttgctgtgctgcctccttgtgtcataaaccccttctagaattacccagttccagcttaaaaacaccccagggtttggccagtgtaccagttgtcccttctttcatccagctatccagtagaaaagcaaatggattggaaaaaatggctgaaggcccagaggggacttcctgggcaaggagataggactatgttctatatgtgggctcaagtatgggcataagcaaacatgaaacccttcataagcatttgctgtgtgccacacactgtgccatgctcttggggcacagagataagaaagacttggtctctgtctgtaggggaccaagagtctaatgaaagaaatacaaacatgagaaataatcattgtgatacccggtgaggggtgacataatataggaaagggctgtataacaaaaatgtaagaggtaaaatatagacctttggttaaagatggcagatcgaacactactacctttcagtgtgcaactaaattgacgataaaagaattgggcatgaactcataaggacaaacgaaacagtaaaggaaacaaaagccatgaagttttgaaagctgggaagaagatgagctagtggggacagacttggcaggcttcagaaggccgagttagttcgcagtggggagagccaaaaagcaacccagttaacacagcagaatctcttgggacctaggaattggtggcattcagtggagggtgagagtgatgttaaactcaggatgattggctggaagtctgtttaagaaatagatcccctggttcctttcctctgtcatgtagcaaaggggctcatgttccctgccctcagagggaaacctggagatttattatctggagagggtaaaacagaacccgggggtatttcaggaacagatggggctgggggtaccttatgtaagacagagaaaataagttcttagattaagaataatttaatatggtgtgatcccaagttgtcttgtcttctcccagtcagttcccagaacactggcagtctgtccatttaccctctgggtaggggactgggaggctcccctctgggaagctggaccaattcaaagagagtggcatgggagctctccagtgaaacgtacagctctgtattacaaagaataaaacttcaatgagaaatgaaaaatttcagtcgaggggatgttgcctacatttgacacacctctcctgtgtgctcaaagcttctagtcctcttttcggtgtttccctcttcaatataaacaggcaaccaaggctccccagatatttaggaaaaacttgtaacatgagagaaagagaaacccccaaattgggagaggacagccacttacaggaagaaaaaaattcacagaaaaacatagtaaattcagagagaaaagcagatgctcgaacaatggcacaaaaacaggatactataaaacaggaatgttctgagacataagagttcttaagagtgtgggactgtcgtgtcaaaaatgaaaagctcatttggaaggtgagaagacacagaggatattcattcattgaggaagtatttcttaatcacttagtacatgggagaacaggcaccattctaggttctagggacacttcagtaaataaaatctaacaatgttttctctggcgataggctaattgtatttattccttctgtgtttccaaattcatacatgcaaatgtattttaaaaagtattatttttataagttgtctaagtccattcaggttgctatagcaaaatactttagactgggtaatttataaatttattggtctcagttctggaggctgggaagtcaaagatcaaggcacagcagatttggtgtctggtgagggctttctgactactttttagatggtgccttcctgctgcatcctcacatggcaaaggggacaaacagtgtccctcaagcctctttccgaagggcactaattccattccatgagggccctgcccccatgacctgctcatctcctgaagtccctcttcttaatactattgcattggagattaggttttaacacatggattttggggagacacattcataccataagtaaaagaaaatgttatttttaaaaaagaaaataaggctgggtgtggtgggttacgcctgtaatcccagcagtttgggaggctgaggtaggtggatcactcgaggtcaggagttcgagaacagcctgacatggcgaaaccccatctctaataaaaatacaaaaatcagccaggcgtggtggcgcatgcctgtaatcccagctacttgggaggctgagtcaggagaatcgcttgaactcgggaggcggaggttgcagtgagctgtgattgcactattgcactccagtctgggtgacgagcaaaattccatctcaaaataaataaataaataacaaaaaaaaataagagaatgagcatgggaacatagagacagaaccggtgccctggtggagagatcaaggaaggcttcagagagggggtgatattgatgctgtacttgatagtgagagcaggagtttcccagagggaaacaggccttggagtagtctatttcagacagggagaacagtaggacctgaaggaggagatattcagtggggcttcgagatttctggtttgagcaaaagagttaatgtttttaataaagatattaaaagcagcagagccatctgagacagattgcccatctgtctctatctttttttttttttttttttgagacagagcctcactctgttgcccaggctggagtgcagtggtggtatcccagctcactgcaacctcctcctcccaggttcaagtgattctcctgcttgagcctcccaagtagctgggactacaggcgcccaccaccacacctggctaattctttttatttttagtagggatggggtttcaccatgttagccaagatggtcttgatctcctgacctcgtgacccaccggcctcggcctcccaaagtgctaggattgcaggcgcgagctactgtgcttggccctgtctttaactttaaaagtgccagcttaagggggattttctacgttacaaatctcttccctcatacagattcatcccacttctaggttgatgactcatattggtaactcttgtgaaacaagagggtctttaaaagccctagactgaaatttttcatttctcattgaagttttattctttgtaagaaaatgattcattgtaggaacaaattaagcatattatatgtaaaatgttgatagataattaggtcacctgataaaacagcattatatttctggacccatcattattaatgacctatatttacgtaacagtttatatagaatgctttaaatatgtatcatgtctgttagatatgtatctgtgatatatatgtaccttcgtgggttagttattattagccccattttacaaatgaagaaaccaagactcaagtattacttgcctaagagtacagagctaataaatgccagaaccagtactaggtttgtttgctttcttaataccaaaccctgtatttattccaacatgccctgccatttcttctgtataataatgaatatatatgttttgaaattaaaggagacagttgataaattaagaaatgaaccggccaggagccgggcacagtgcctcatacctataatctcaacactttgggagacccaggcaggaggatcccttgagctcaggagctcgagaccaacctggcaacatagttgagaccccgtctcaacaacaaaaaataataataattttttttttaatattagctgggcacagtggcacatatatttagttccagctactcaggaggctgaggtgagaggattgcttgagcccgcaagtttgaagctacagtgagccatgatcgcacccctgcactctggcctgggtgacagagcaagaaaagaaaaagaaagaagtgaaccatggccattgcacatgtttccagcatgtgttgctttcccacctgcttattacattgatgcgattctgtggaaaatacccattttcttttgtttgaggaatttagaggtatttatcaatgtgttgtccgaggaagcctggttagtttgagttacagagttggagtttgtttgagttgttacaaatttgacaaatgatcaacttaaaaggaatgttgtatttgaatgtcagaaattctcaaatgctattctagtgaaaaggcaacaacaacaaacaaaaatcatgctcaggtagaaagtcacttgttgaacaaataccagatcagagcctgttatgtcttagacactatgttaggcactcaggggcctattaggaagaaggcaggtacagtgtttcatggaaaggtcacagtggcttggattggagtggtggccctggaactgtagaacggtgttaagagtggagggataataagaagataagattgataggactggataatggattcaaaaacaaggtaaggaagaggaagtcagagttctggtgtgtaggaacagagggcttcagtcactgcaaggtcacaggaggagaagacaaagggaccatgagttctggtttggacatgttcagaggtgtgttgtacctttgagtcattcaagtgaaaatgccaggaaggccactggatatgtgactttgagaggggtggtaaaagccgatgatgtaaatttaggtatcatctgtgcttaactcatcatttattgacattgtggacatggatgagggagaaagtgtagaggaagaagaggcctagggacagaccttcagatactctttgatatttgatgttgaggtagaggaggataaaccagcaaaggaaacttagaatagccagagaggtgagggggaagccaggaactcttaggaacccaaagaaatagggtttgtccggaagcagatggcacttgacagtgtgcagtggtgctaggaagttcttctactagaggaaggcgattctgaagagtgccattgggtgctgtggatactggtgaccttaacaaaacagtattaatagtgatgacagggaaaatgctcctggagggagtagaatgcagagtggagaagatgatgaggacaagacctagtgagtatccacccccactggaaaaatctgcctgtaaaaccaggagagggccaggcacggtggctcacgcctgtaatcccagaactttgggaggctgaagcaggtggatcacaaggtcaagagatccagaccatcctggccaacatggtgaaaccccatctctactaaaaatacaaaaaattagctgggtgtcgtagcatgcgcctgtagtcccagctactcgggaggctgaggcaggagaatcacttcaacctggaaggcagaggttgcagtgagcccagattgtgccattgcactccagcctggtgacagggcaagactccatctccaaaaaaaaaaaaaaaaaaagaaacaaaacaaaaacccgggagagagggcaaggaactcacatgaaataaggagtcagccataggagagttttcctgtttgcattttgttttgttgtgggtttttttaatttttatttttggcagagtctcaccctgccacccaggctggaatgcaatggtgtgacctctgctcactgcaacctccacctccaggttcaagtgattctcctgcctcagcctcccgagtagctgggattacaggcgtgcgccgccacgcccagctaaatttttgaatttttagtagagatgaggtttcaccatataggccaggctggtctcgatctcctgacctcgtgatccgctctcctcggcctcccaaagtgctgaaattacaggcgtgagcccctgcacctggactgttgtgttcttaaaatggaaatggagcacgtttcagtgtagatgggaaaaaatcttgtcaagcagggagaaaaggaacatgcaagtgaaagaagggctacttgaatgttcaggataatactattaaggaaaaacttgctagactacccacagacacctttgaaatcacttcttcatcatggtgaagaccacaggaagctttgtgctgaagtcttaaagagccagcattttgaaagaacatgattctgtcagtgtcaacgtcaggcaatagtgcctgataatggagacatctgtgtcatgattgccatgctcagttcatcttcacttacttttccaggagctgatgaggatgtagagagtccagagctgacaacatctcgaccacttccaaagatactgttgactagtgctgctccaaaagtggaaaccacgacgctgaatatacagaacaagatacctgctcagacaaaggtgcgttctattttccattgcattgcattatcaggttattacaaatgcttcactttactgactgtacacaacagtcccttttgtattattttcttctttttggagctacccatcatgaactatgtacacaacagttcttttaaaagaccccacttaaaattgtgtaaggacaaatggtcttcaggtggtgttataaatggctcttccttactctttttgatcattttggcatttacccacttataatctctgtcatccaggctcaaattatatacaactatttttcacatggccctccttcttaaggaacgtctgaagcccagttaagaagtaaagccctgtttctttggtttcctggtttgtaggttacgtaattagaagactccaggtcacgtcttgaggtggtcctagtctcactaagtcatttctcagtcttcctaggccgaccatcagtactatgtaatccttgacctctctcgatgatgatgaacctgggtacatctgtatatattcattttgagagctgacttattaagaataaggtctttggccttagacctgagtaaagtgaccagctaatgaaaacttggagcttgtgattttgacctcgttaatattgcagttagctgaccatccactaataggtaacccactgaagttagaacatgcatattaaagtctggcaaagacctaagtttcaaatcctggatccagtcaggtttcttagcttctgaacccatttcctatgggccttgaagaagatgaaatgtgagtgcatgtagcatggcacctgagacctagtcaccattctgtaagcattaattgaattggtggagcagaagagaccaagccaattcaccaaatgagcatgtgtaataactgtagtggtagactttgcaatcagtgcaggggtaacatatggcttaagaaaactcagaagcacaagcatccccttttagagctcacccatctgttgattagaaatgagatgctgccaagctttagcagcagacagggtatggatatggaaggctgtttgatgaaggtggcgacaggccttccttggagtaagaatcatcccgtcttcaggccagaatgcatgtgggcttttcttacccttgccccagagtacctttgttcttcctcctcctccatcctcccagtgcctgtgactggaatggtgaatggcaccgctggatgggtttctgcagatgtggaacagccaggaagccagccctgtccaaattgaagtgctttctgtaggaccaagaagggtcaattactattagtggtagacttcacaagccaggcggtaggaaggcagggagagccctatgagaactgagaccgactcacctggcatgtgctggatccatgcataaaagctactgtatcaatgtttcagttgagtgaatgaaacaaaaaaagaaagggagaaatgaaaagtgcaggtgcaattggtggtacgatgactgcctcagagtgtgtgtggcacaattagctactatttactaaagatgcatttggctcttaccacatttttatttgaccacttctcttgactaaatctgctgaagtcagagacaattaggactcactagcttgagggaagcaactctcctgggtgagttttggcttgtagtgatagagagttctatcctaagcaagacttaatttgacatagagttctgtctggtttgttaacagcaatggattgaccactaatttaagtttttaaaaattggttttaaggaagtaattgcatcagatcgagataaaaaatgtagaactttggcaggtgaatttaaaaattaaggagcccaaaagattttaatacatttatattcttactatcatttgtgttcaatatagtaatagtagaaattcatccatttataggagatttgttgagtgctattcattatgtgtcgaacactgtttgcagcactgataatgataatattgatcatgaataacatgaataataatgattaaatttttcattttgctgtttatgtggtacagccgaattgaacattgcctctaggataccattagtgtagattttgcttttcaattggtctcacagtggcattaatgtcactgttacggatatcctatctagtttgttgtaaatttaagtgactaaaatgcacaaaagggaatctcgttatttgtttgagaagagcatcactcataagcttttacttctgttgcatttccatggcatccaaacaaccagacatggatgtggcagatctttacttggcctcatttaatcatccctgctgtctttttgcggattcattttgcacatacattcatacaagagtgaaggtatttcagattagttccatattaccaaatggtatcttcttagtcaagcctttgcttccatacgataaaacattttgacttaaaaaatgaattttccacccagagccgcttgaggcttgtgcacctccagctgcagggcggctccagttctgtggagtccttcagttcccacactctcagatccctggattgcacgctttgttcagcctgccggatcagaggctgagtcagaggaaactgaaaagatcaactctcttaaatgactttagggactcaatcacatggtgaaaccatatgatttgtaataataatgggacaaagatgatatggatatggatgaattaaactcagtctctcatattacagtaactacttaggtccatttcatttctcaccagaacttgtttacctctctccctagtcacaaacctgagtattcacctatttgagatttctcttcccttttctaacttgtaatagtaaagcagtactaatgagcagtgaaaaggtctctagactagaacccagataatccattctctgacctgttgtctgtctttccacaaggcagccaattaatgatgggcttttcatgagaagaatagaaaaatctcagcaaaaatactgccaatgagctgctctcttctgctttactttggtacctgaaggcctgggaaggcctgtcgtatttccttctctcatagtaatagaaaggacggtgacattttcagtgcatattgtgcaccagtgaaatgaaatttctctatggcctctgctttttgtaagtcatggcaggttgaagtttaggtagtacagggtttcttgcaatttgggaatgacagttactctttattatactttattacataccaccttcagtagaagtgtagcgttctgctcactgagacagggacctattgatcttacataccctagagtacaaatggatccacctggtctagcttatggtccttcctagcaatgagggtggccttaaggtgcagaaaagaagtatgatgtggtcagggtcccacaggagctacttgcacagcccaagaaggtgtgaggtcttttcttcttacactctttaagcctctagacttaactagcaggccgccattttggatgaactctagccttcagaaagcaatcatttgctttgctgagccatggtatgttagactctgtggagtcctaatgaagatggtaggaagctctcaggaacttaggaagagtagtagagctgagaaggattattgtctgcagtattttttttgagacagggtctcactctgttacccaggctagaatgcagtggcacaattatagctcaccgcagcctccaactcctgggatcaagagatcctccacaggtacacagcaccatgcctggctaattttaaaaatttttttgtagagacaaggtctcagtatgttgcccaggttggtctcgaatgatcctctcaccttgggctccctacccagccacctttagcctttaaacctcaatgaagttgacagtgttttcatcagtgatgctggccgacaagaacttcagactgttagagaatgaacaactcctttgaatgggacttctctaatccactggttcttaaactatggaattgtctggagaacttaaatagcagtaaaagtcagtgccagctacatagtgccctgtatagctcagaagtgaaggagtaaggagaactggggcagtgctgttgggttggagcagtcagagggagatggtgacctgaagtcagaccaattgaaatggaacctctagtagtaggactgtattttttttaatgcctttcaggtgatgtggatcagcgtaaccttgggtgattcacataagatggccagtgatggtgctgagagttagaaaggcaagagataatttctgtgtaaataatcctgggggtttagtgaggtaaaaggtcagagaaggcttcattaaggacaaacagatagtaaaagaagtgcaacatttggactggggatagaactgcatgaactagagcagagttccccacccgcttctggggccacggaccagtagcggtggcctgttaggaaccaggctgcacagcaggaagtgagtgagcattaccacctgagctccgcctcctgtcagatcagtggaggcgtgccattcccataggatctaggagcgcaaacgcgattgtgaactgtgcctgttgtgctccttatgagagtctgaggtggaatagtttcatccccctccatcccccccaccctcccattcatggaaagattggggaccgctaaactacagcacagatactaagaaccatttttgataatgaagaggtggtggaaatgacctcacagggttttctactgggagtaagtggtgggttgggtgaggactggaagctacccaacacctgcagttctgaggtcgatgcgggatgggagctgggctgtgatgtgctggccacctgaacgaagctgtggaaatgagaacccaagggaagaagttaatgtgagagcaagatgggaggcaaattgacagtgctgtgacatggaaaacatatgatagaaaatgtgccgtaatagataacttggtaacaccccaaaatacagtgccattaatgggaatagaaaaggaggttgatctgattcagcagtgaattaattactacttagacttgacgagtagagttaaaggtggtacagccaacagttaatgtcctgcaggctgctggcttgttgggaataatgctgactagagatgcggctgtgagaggtattcccatagatttctgcttgagcattgtgcagtgtccgagacccagtgagtgtcgttcattagacaggtgaggaaatcaaggtggagaaaagaagtatgatgtgatcagggaggagctacttgcgcaatccaagtccctggaagtcctggtctagggtttgctgaaggtaatataactagggggaagcattaggagtaaggcttggggattgctccccacagagtggggacaggaaaagcccagtcaggcgtgagagaatatctgaaagggaactgttgtcctagtgccctgtgtagttcagaagtgaaggagcagggagaattggggcagtgctgttgggttggagcagtcagagggagatggtgacctgcagttagaagagtggtgagaaagtagaaatcttaggaaatgtccactaaaacaacctcaccatgtccttaggattattatgaactcactagctctccgacttgcctgatcatgcgatgggtgttgtgcaaaccatgaactacatgggtccatcatgacactcacccattgctataaacatcacacaagtgattattccagttatttcctaaactcattctttgggggaaaaaaaaattttggaatatactcatctattatttcttctttccaacacatttccttaaatcaatgtaatctttccctgtttcccataccagtcacctgaagaaactgataaagagaaagttcacctctctgactcagaaaggaaaatggacccagccgaagaggatacaaatgtgtatactgagaaacactcagacagtctgtttaaacggacagaagtcctagcaggtgagtagcctggtgggcctcaggtgggagggtgcctacataggcctctgttagtctaagtgatattcaaaagtgcagcaaagcttgctgtcatctttctgctgaaagcagtcttgtgggtgcttgattccagagcgagaagcaagaggctcagcaaacattgtctttattgtctgccagctccctcaacctacctcttcgccagccatcgggcaggggataggaggtagcctaaaagagggaaagttaacatctgaattgatccagaacaactggatgtagagagatggcagagtgtggagatccatcagtcttgctcacaggcattctacatttcaaaataaagagaacgaaaagttctttaggggaaggcagttcatataagtactgcccaaagtgttaagaacgttgtttctattttaacttaattggatggaagtgcaaatattttaaaggggaaaactttcaagatttaggcacacttggtagtctcaaatccaagaatagaaataaatttgcatgctttttttcatgtatactctttaaaattttaagtcaattatactatgttctctgttgaaaaaaagcagttagaaaattagaatatgaaatgtgagttctgaaaagacaaaagtagttttcaagtatggaattagttaagatcaaggccagatttttcttatcgaggtttttgggtggtattattaacactaaccaaagaaattactgtaccttcctgaggagtttcagatttgcatagttaccaggttgcttcattgaatccagctttttttttattggggttttcaaattaagccttttataaaagtgtaagtagattaggcttgacaataaagctaatgtctgcaacccttgaatctcttctaaagtaatcttccttttggttgtttcagctgtcattgctggtggagttattggctttctctttgcaatttttcttatcctgctgttggtgtatcgcatgagaaagaaggatgaaggaagctatgaccttggagaacgcaaaccatccagtgctgcttatcagaaggcacctactaaggagttttatgcgtaaaactccaacttagtgtctctatttatgagatcactgaacttttcaaaataaagcttttgcatagaataatgaagatctttgttttttgttttcattaaagagccattctggcactttaatgataaaatcccattgtatttaaaacatttcatgtatttctttagaacaacataaaattaaaatttaacatctgcagtgttctgtgaatagcagtggcaaaatattatgttatgaaaaccctcgatgttcatggaattggtttaaacttttatgcgcaaatacaaaatgattgtctttttcctatgactcaaagatgaaagctgtttcatttgtgtcagcatgtctcagattgaccttaccaagttggtcttactttgttaatttatctgttgtccccttcctctcctctgccctcccttcttgtgcccttaaaaccaaaccctatgccttttgtagctgtcatggtgcaatttgtctttggaaaattcagataatggtaatttagtgtatatgtgattttcaaatatgtaaactttaacttccactttgtataaatttttaagtgtcagactatccattttacacttgctttatttttcattacctgtagctttgggcagatttgcaacagcaaattaatgtgtaaaattggattattactacaaaaccgtttagtcatatctatctaatcagatcttcttttgggaggatttgatgtaagttactgacaagcctcagcaaacccaaagatgttaacagtattttaagaagttgctgcagattcctttggccactgtatttgttaatttcttgcaatttgaaggtacgagtagaggtttaaagaaaaatcagtttttgttcttaaaaatgcatttaagttgtaaacgtctttttaagcctttgaagtgcctctgattctatgtaacttgttgcagactggtgttaatgagtatatgtaacagtttaaaaaaaaagttggtattttataagcacagacaattctaatggtaacttttgtagtcttatgaatagacataaattgtaatttgggaacataaaaactactgaataaatcatgtggcctaatattgaaaatgtcactgttataaattttgtacatttttgatcaaatgtacatctcccctttgctaacggccgtctgctctcaaggatgacgtgggtttgatttctaagtgtttcacagtgtctgtaaatcaagaccaaagagcctgtcgatgagactgtttattaccagattcacttctgaattggccagaggaaatctgaatgtattatcctgtgtgtgtctaggtagagatattggaaggctgccaggggatttcgaagtttgcaacctttataggataactgatggcaatattaagacagacgcctgcttttgcaaataacttacaagactgtaaattccaaagatctgaatggggctttcctgatgttggtatctaaggcttaggcctatagattgatttacctttggaattgtgctccaaatgtctactgaagcttaaccgaagaactaataaatggactacagtagctcacgttacagggaaggagggtaggcagggaggctctgtgtgttaaaatgagggtctcactgctttaggattgaagtggctggaaagagtgatgcctggggaaggagatggagttatgagggtactgtggctggtactttctgtactaaacatttcctttttctattttaccactaattttgttttaaactgtgagccgtccaagtcagaagaagacagcaaaaaaagcaacttttccaacatacaatttacttttaataaagtatgaatatttcattttgagaacattccctggaattgccacataattcattaaaaacatttttttaagcaacacttggaacagtgtttactttaaatccttaatggccttaattaattctcagattcctgccccatcacttacagaaccaattcactttagagtgactaaaaggaaacgatagcctagctttctaaagccacgctgtgtccctcaattacagagggtaggaatgggtatacctctaactgtgcaaagcagagtgaaattcaattcatagaataacaactgctgggaatatccgtgccaggaaaagaaaaatttctggcaaatattttgtcactgctgtaaagcaaaatatttgtgaaagtgccaaaataaagtctgtcatgccaaaagtaaa

SEQ ID NO: 111 - DNA, 98547 bp, Homo sapiens
agttgtacgttcgaaacctgtcgccgtcacttgcgcgtttggcattatccattgtcaccgcggaggaacgagcgctcgagatatcatcagtgcccgcaaatctccgcgccaaggcgctgagctactcctttccgaggtgcgcctctggtcctccgtccctggtgcccagcagcggcgaggcggcatctccgctcccgccgccgtgtccaccgagccctgggatcagggtggcagttctcaacgatgggcaggagggacctcggcggcgacccctaaaacaataccatgccccgggatccccgctgctgccgcgccagcgtcttccctttccacctccctgaccctgtcggattcggatgagcccattgcaaggagaagacgcagccgtcaggtaaaaggggctgcgttgccaggtgaagtttccagtaaccggccgagctgctgctacgctggcaccacgctgtctcttcgggggattttttttttttgaaagagctgggggtggtcatcttaagtggggtgctctaggctttgtctttcacctggagagaaaataggcagcttagctctctctcgactttggggacatctgtctgctggtcgaatccacctcctctacggagcatcatgactgagttctgggtcaaaacgcaaattttcttgcctggtagatgcatcgatgctaaattggggttctcagtgcccctaaccttgtcagagttcagtctcctacttccctagattgaatctcttaactttcaccagtaacaaccctctcccctccacaagctgttgttaatgtcaccagcgttattatcaggctgttgtatctaaagacaccaacctactacctgcccgtaatctgggatctattagcagttaaacagatgcggtggatactaattccttttccttccagttggtgggggcgggtggggctttttccaaaaccaagtcccttccagccctgcttgtcctcttcgggctggcgggcactgagctggggccatcacgcctttctagagcgcctgcggaggtggcgaaggcttggagagcatacgaggcggaatccggatcgagtgagttccttgagccgcttgcgtgggacgcagggagagggcgaataacgccctcaggcgctgaatgcaggggcaaggagccagcgagggtggctggagcaggccttgccagctgttaccaagtctctccacaggcttgggggcttggggcctcctggaaagatccctccgccgcgctgaccagtacggggctcgctcccgcactttgaaggctgccgcggtctttcgtcatttataatcaagcccaagatcaaggttgcaagctgaggtcggggtactgacaacgggaatgaagccataggggaagaggataactgggacgggctggacccatacttgatacccgggaaactcctagagcgtgtggtgctcctgccagcggcagttactggtggagctgaggccaccgctactgtcgtcgttggcgctttgcttctggaacctcccagcaagatggcactcactgtctgttcccttccgattagcacccccagccgcgctccctcctccccgggatacgtattagtcacatactgtggggagaagatgggctatgtaaatgtaagtcaacgcgctttcccagccacctttgcataatgcaacaggaacagcgacccgcgcgcacgaaccgggtagtgtgcgcgtgtgtgtgctcgcgtgtgtgagcgcgtgtgccagcgtgcgtctccgcgcgggcgtgcgtctgggtggatccttgcgtggcttgggaggcaaatcgggcgtttctccaagtcgtcttaacatgatttaggctctcaaatacgtgaaagcggtagacacaacagggatgcgaaggaaataaaaaacaattggggaagtggtgccaagtcactcaggctttgaactgaggacgagtagtgcggtcgcgcctggggcgcgtccggaaatcatcctcagcctgtggcggccactgccccacttaaactcttctgcggggagagttgagcggatccctggggggttggtcctgggctagttttaaactctccggttgcatctcgcgtggccccaccgacggcgcgtctcggcgtagctcttggcgcgggctcgttctccctcttctgttcagattcagcctcaccggacttgttacaacatgacagcaacttactggaggcaggaagagcagcacgaaataagatgagaaaaccaaaaacatctcctccttcctaaatagagacgtgcacctagctttttttacttgtttgtttgttttttacattaccctttaacctttggaaagagactgcgaagtggaaacgttgcctgtacagaaatcaggcttcttagctgtcaagactgtttcctaatctttaggctgaatctttctttgtccgctgcaatctatggggaaatttaacaacgctcttgccagaagcagccaggttgaaggaagaaagtgggggtgtttaaattaatcctattaaattttggattactcccccagttaaagtcatttaaggtggtccaggatgagggaactagtgatggggtgaggagtggggggcacatcaccaaggttgcctgcatttgaaataacgccattttggttgagaggtttgctgtattttaccctctaatctcacatttcgatcatttctcagtgtctaagtaatagatcctccctcttggcagtacaccattaagcaggtatggggaattctcctttcagggttcagatggtgacattatccctaaggactggtggtaggaacggcatgtgccgggtagatagagagaaggtcagggtggcatctgccgggttagccaggcgctcttcaactcttttcagagaggacagggttaaaagccaagtctgactttgcctcttggaaatcactgggtagcagccgcgcctcccaagcattctttaaaccagaaaagtaggagggactccgggagagagggagggaatgagggagggagagaaagagggctccaggagcggagcgcgccagagcgcgagggacggagggagaggaggagcgcgggagctgcggaggcgatcccgcgaattcattactgtaaacatatccgggggtgtcaggaggggtaggggtgggggccgcggcgcctacattagcccggccgcgtcggattgaggcagtagtgtggtctgagcagcctccagacccacgccgggcgggcgcagcacttggagcgagccctgcgcccgcccccgcgcagcgccgcacgcccggctccgagctgtccgcacacacgcgtcggaggagagcccgcctagctctcccgccgagtcccgggatcctccaaatccgaggagctccggcgccgcggggcagctttctgccgccttccccgctcgctgtacttcttttggggttcgttggcttggcgaagcggagagggggaggcggaggaggagagaaggcgggggtcgcggcggccgaagccaagagaaagtggcatgcccgaaccctggaggcggtggtggcggaggacgggggaagacgatgccgcagctccgtaggggacgtaggcgagagcaagcgaggcgagctgggcgccccggccccggcccgctgcggggaggcgcgcgccgctctgaggctccggcctccgcacccccgcgccccgacgctgcgggcgacagggcttggctccagcagccgccgccgtcgccgccgccgccacccggaggacccagcaaaagtttggatctgggggagggcgcggcgctgagcgggattaccaccagggctggaaggagacctcgagaacctttgcaggtaacgcgcgcccccaaccctcttcttccatgccccgccgctgcgctcccgcttcctcccagagcccttcctggccctcgcgggtctggcagaaagtaagagggaggcgaagttcaagatcccggggatgagcaccgagcgctggcagatcactagtcacgttagaggggcagctgtgctgagaggcaaattcccccaggagtgggtgagaaccctcagccccagctggtgcctcatcttgtagctctttggaaatttggaacgtgaatccaggggcttttagtattcttcagtccagagaaatggttcatggatttcacttaccgcacgctccccccttcacactctcacccgtttagcatttttaaaaaatgatttgagcccactccctactctcctgcttcgtttagctggacagcaaatttcaggggtgaaatattgcaagcaaagaggaaaaaatatcctttccccttttgacatccctggaatcctccttccctcccttcaccttctggcatcataaaataggaactttagaagttacattttcaggggtgaggtgaaacgtgttagctattggtgatgtgaatttgccacgactgtccgtatgtgtgtctgtgtgtgtgcgtgtgtttgggggagggggttagtggtgttgcagagaggcggaatttttctcggtggcctgatgcgcagtggtcctaaggtagtgagtggccgcgtgtgcgcattgaggcggcggcagcggagagaagacggtcacgtttcccgaacggcagccttacttaggctaagaaaatagctgcagctcactccaaaagcaaaaagattccagccccaactccccgacgccccctttcccccaactgagtttttagtttcaaagcagctcagcgtttgctgctatctttattatgatcattatttattcgcctggaaactcatcctgtcttctcctgtgaatgggaatcagtcttcaagagcttttgattaattttagtaagagaatctcttgtaaagcttacagttagctaaccaagtgtaaggcacaaatccgtgtaaacgctcgctcaagagtgcaaggtgctgattagatttctttacatgctgcatttgctatgcaaagcctcttctaaatgggagctattgctccccactcagctgggaggctctttaatcacacagggtttcagggcgctttggagcatgtccactcgctcacagacttattgctaaatttattatgtctaatttctcacaaccaaaagctaatctgaaggctagcttccatatcggaccgatattatctgtagacttaaccggtatgaccttaataaatatccaatgaaaagcccccccccaaaaaaaaaaaacaacaacattttgaggtaaatagaatgcagattggcatttgtccagggatatattaggttgttcagtgtgaatgtaaaattttaggtccgtatttgaagtgttagaactagattctcacttgttttcattactgaacaacatgggccagctacttatgacgggcaagccaccagccaccatattagcagagaatcaatctgtaggtaatacgcataccatgaaaagttacttctttctccacagcgttattgcgtctgagaatactacttctcttcctcccctccttgaaagcccgaaacaggatagggttaaaccatttagggattttttaataatcactgaagacagtgcaacaccatactgtcatgttgagttgcaaatatctttgactggaggaggttggaagatgaaatttcaaacattattccatgtctctgccagtagagatacaagaaattgtaaaaagaattgggctagctgtactgtagcagaacctattacaaacctagcatggaaggaatgctgtttttttttttttttttttttttttttttgttgttgttgttgttgttgttgttttaaagcccatgtcttaacacttcagtagtttcattgcagttttagaaattccaggggatgcttttagcagaagaaagtagattcccaaatgacaccatgctgggctaccctggagtccccaaagcagtcctggcttttcctgtatgttaggtttcagatgatgtgatcatatacgagtttgactttgaccggctggatctaatttgaaccttctctgatgcccgttacatttatattctggcctgctggagagtttgatttaggatttagacaactttatattttcccagtttgaagctgtggttttaagaaaggctcaagtatgtacaagtccagaagctttattctgtagagacccagtgtgaacatctgatctagtttgactcttgagctttgtactttacaaggaagaattcctgcttctgggatctgaagcgtctgaagttaaaaaacagcaagggtgccgagcggcttttggttttgctctctgtttagaagattcaaaaaaggtcaaggtgatgtaatatttgtattcaggtcagacttttctggataatcatcttttgatatctttaatttcaattcgagttcctttttcactagattactttaataactttgtgatttctgctacagtgattcaaattcagtccattagtgacctctatctgtgagaagtgaatactcatggttttttttttttttccttctcatcaaagtctgaagatgacgtcagggtgctgggggtgaatcccaacagttctgtagttctttctggatatttcagtttacctaatttgatttttctaatacagagttcaatatggataatgacatttaattacagtaataaaaatgttatggactaatagagaggcaactaaatggttattccatatagcattgacagtgtgatcaacataaataaaacaccagagctatccactgccaatgaagggattgtacagtcaggctgactattgttttgggactcacaatgctgctgaatgtaagtgaaattttattgctcctaagtgcttacataacaagggaaacttgagacgagctcaaaatatgtatgtggtaactagacttcatggtagctgtgtgtatatgtctttaaattctgctgtgcttctactgtgaacttatggtacagatcaaagagtgtgagaagagtatttataaacagatggtccttttaaggagactttaaaaatctgattcctaatccaggtttgtcttgtgagggttttcagatagaaatttcaattttagccgattatttcaaatgctaattgaagacaaagtttactgaatttcttaggtgggtggataccattatctgacattttccagatggtttttgatctagtggtatttggggatatggaatttttaggaggttttctttcttttcccttgggcaatttttacacaaaagacttttttaagactagctattattattattaaagttaaacaaccattatcttacttcagacaactttcttactttttctactctccaaattgcttttgtgcaattatatctttcttctaaaactacatgtcgcgaattgacgtatcagtatacttttactcctttcagtaataaaggacctccaattacgtatctgtttatagtaaaacacacacacacacacacacaacacacacatacatcaagaaccattttaagacagagattcttttcaaggtttgaactatgttccttttttaaaggctatgacacaaatattgtaataaaaatatcctgtgttctgatgaatacagagacttatttcattctcatggaacagtaaaacactgtactagtaaaataatcagtggtattttgagtacatggtcaaaatctgttagaaccttcatgttttgttttttttttttcttccttagcgaatttcacatctactggtgtttttggttttctttgattccttctactgtggctctttgaagtgattcaaaattaaacagtagctactttttcagggaaattcatcatgttgtgttcaggattccagaagagttaatgatgcagaaaaagttctgtaaaacatctttctaaaagaagtccttctcttgcaagcctcccacttactggcctcctgtaccatttgcagtgaattggaactccgttatttatttatttttcaaataccacctctaacttaatttaatgtaggatgtgttcctgcaaaagtgtgcagtgccatgtgccttgagtcacccaaacaaagcagtgtcattgttacatccggatctgttaatcagggaaggtcaaagaaaatattcttatataatttggaaagtcaaaaggacacgttgatgattctcaaacactggtcagttattctgctgatacttactaaggacatactttttctggcagtttaatggttaaagacctcagccatttttgaagcattcacaaagtaactctctggagctactaaccattagatgctcattagaactgagcagtttttccccccactttgttcccaggttacttttaagggaatgtgcaagaaacttggaaaaaggtcttctgttcccttcagttcacatgtcatactgttatatttcagttctctttattagagctttcaagacacagataaaagaatcttccatctgaaccccttaagaacctgagggcttttggatttcaacccactgaaaaaatatcaggtcccaaagtttatagatgatattaggcctcagaacaattgaaaccaccttcagcagggagcaaaagaacagtggctcctaaaattggttcacaaatatactgtccattgaagtcaacagaggtcatatggctgaatggaaaacattagacgcatatcagtcctgaaataggttcacatgctggtgtcactcttagccccagctgcctctacatgtcacgttcatcagaatctagcatctaaacagcctctgtaatgatttcctctcccactttgctcccaaaattggactcaagtacttagacaaaggaaataatgcaaggaattataatattcatcatatctaatagacaaagtggaggtaagaggtttgtttgcgtgcataggggccatagaggttccaggaatctctttttaagattgattttgagagcacattcgtatccaccctcatcactccgggcccttacattttccagttctcacatccaggatttcatttatttctcacaactgcctctgaatttatacaggaaagtcctacctgcctcacttctgattgggtaactggagccagaaagaagttaagggctactaaggctgggcattttacattttatcatacagatgtagaattctgcagatagaattgagaagttccattctttatgaaaccacccaaaatgatgagagttgtttgttttcgttggaacagtaaaaaaaaatcacaagcctagaaatattttgatttaaaataatagcatttcactcttcagcattagattagatgacaagtttacctgttctgaatgagtataatcctatgatgtacgtatttggcactttgtggtggggagtgagaaataaatgagattgctttgggggaaggaaaagaaaacctacattctcatgtcagcatgcttctttctatattcagccttgtatgaattacttaatctcctggagacttaatttcctctctacagagttcaacagagttgttgagaggtcacataagattaatgtgtgtgaaaataccttgataacaatacagtgttatattcctataaagaggcattattcaaattgataacatttatcactgcatgcctgtcttgtgctatgatagactaggttttatataaataaaatggtaaccaagacagagtcctgcctttcaggagctttcgctcttacggcctcaagagatatcatctaaccaatacactggctgctagcccctgcatcatttcttccattcagttaataatggattatctccttttctgagtttgcgctattttgatgaaagtatccattttaaggataaatgataattagggtgagttgagttcaagggtcaaacttttcttttgattttggaaagagaattttgaggattttttttggaaaaataaatcatcaatgttttctgaaatgaggtcgtttctctttttgactggatttacagtttaactatccaggttaccttttgcaaacacacaccaatagaaatacaatgattttttaaaattttgttttgcaaaataaggcaggctagtgcaaaagggacattttgtagtttggcaaacctcctcaacccattaacagtgaatagaaagacaatttattatgaagccaacgtgtattccaaagcttggctttattttgatgttagtgtcattaaaccctgtggaacagttctttacagtgtatttctgcatgttttgttcagttctgtttttactattgtcaaatctgagactcttaattttaaaggttccaagagtgagcatgtttatttctctttgctaaattgtttacatttagacctttgtaaaggttaattcttaattgtttttctgttgcatagttgaaggcttcagaaaacaaatgccttggtgaaatctatatttataaaatacgtggttggatcccgattcttggccaaaatgagtatttctttcggtgatttgaggtatgaagtctgtatccaacaacattcttttcaatctatgatttgctattgtcggagttctgacacttgcttttttaatgttttttttttaaagttgattagtactttagcagtacattgtaaagtatgtggccacagaactgtattttaacatggaaaattacttgcatagttcggcaaaattaatctgaataccttttgtactggcagtgttgaatgatataatatttgaagagagaaaatatttgctactactttaaagaggtctactaataaaatgagaatcatctgtaggtatatatgtggggagttagtacgtgtttatatctctgaaatgcaccaacaaatataagtcttatgtactatggggaggaagtatggttatagcctgaagctaggtagtgccagtttagcacatatgtccttaatatgataaaaatagtgatgtaacccaaatagtttttaattggtgattttctttttccaaataggtcttagggaaactgtaaatgaagaaaagtacaaaatgcaatcagaaaatatatttaagtctgactggcctgatcttcatgaaggagatattcttatggaggtttcaccaaatgaagaaagcttgctcattcattcaggagatgatttttagcactatccatgaactgggcatagagtaagatgggacaggccaaaagtaggtaaggcatgatccctccacttgaggccagctaggctagtgagcagagaggtagacacaaaacctaattgcattgcagttttatacaagattgaagggagtgcagtcaacactaagtatgccagaaactcatagtgttagtgaaaagagctcttcatttggagatggacagtcttactctttgtctccttaagtagaaaatggaggaaaatggaggagtagctctttctactcctagagctattaattttaggattgagataattctttaaaatgtctacctgttctggcacataggagaggcctaatgaatgccgactgtaggtccttctgtctccaaaatgataatgatttcattgtcttaccattaccttctactgacttgtctcagtttggggaatgaactgggtcctaacttggactttatttgttcattgaaagcatagcctttgtggcaattaatgggtttatacccacccccatgccttctacctcacagccatgtgtccttctgccgatgacaccagtgcctgcagcttccaaggagttccatgtctagactatgacactgagctcagtgagccatggttatgtccttgccaaagtacaaagatttttatcaaaatgaattttaacaactttcctcacacaattcactttatacatgactcttggcagagtcatgaaaatattttattgtagaagattagcatgtaaattatcgttatgcttgcttaaggcttattctatccttatagaatgattataccttgctgtgtacattggaatcagaatgatactcttgggctatgagttcattgtggaactatttctttcagaagataattttcaattaagtaaaggaacttcttactgtttctactgcagatacttctgaacaaatagcagtgttcagatgtcctggtaaaaatacatggtactggggttatttttcatttatcattataattgcatgtatgtatagtataatttctgtgttccattcaacatttgagatttgcccctgtttttttcaacactgtgaatccgtaaatttattgatgtaggaaagctatatttaacaagatgttaggcatgccccagacctccaagctaggaaacacataggctttttctgttaagatcacataatatataatgtaatatatacatataattaatcaaattggacctgagagaagcaggcactagagtgtattttgtaagctgttaacatcttagtaagtagcttctgaaccaacattcaacccagcataaaacaaaaagaccttgttttgctactttaggaaatgtaagagagattaaaattctttgggaaatggttttaaaaagtagttttgtactcagataggtaaagaacaagtccagtggtgctgacagcaatggaatttaaaacttgattctaataatctctgagtcccgaaggaatgccacgcagacatccgtttgagtcacgagcttgtaactgaggatttgacaaagattgagtcctcactgtgtgccaggcaccatgctaaattttgtgctaggcacttgggatactctttcagacaagactttgtccctgctcacagagaaatctgataggttggcctatagtcactcttttctaaacttgacctatctacctgaattaaccgaaggagctggttagaaatacagattcctgggccaagaagaagaacctaaagtccaacttcctgtaaccatcaacacatttaaccctgtaagtttagagtttattgtaaccttctcatgccctttgctatactcagtgtgcaaatcatgaagactaaggtggatcctgttttggtggagattctgatgtgttaagtctgtgatgaaacctgggaatgtgagttcttgaaagctcccattattggaaatcactgagctagatagtttttagaattttttttctgaccggagaatcagtgctttttatagttgtctgacttgtagtcacttgtgactttctgaaagtttttctgtgtattttgccacatagaaaatattgctcaatttaactccatctgctagaaaagtaccttcagagaggctagatatcagggctggcttctctcttggtagcggcagtctcctgtctgttctccccaccatcagtgtcccctaaaccattgtactgtttttggtgtccccagaattaattttctaaaaaaaaaaaataaagaaatcacatcatattcctttagaaacctatatctttggataaagcccatcaaaacttgttatcatgccacgcaagatccgtgacaatctagatctcaaaccactcctcagacctcattgttcagcacccatcccctgtaccctcatgccaaacatggtgaggcatggccctcttgatactttgcctttcccatgctgtttaccatttacctagaacattatcgcatactctccatttggcaaactcttcctttaagaggcacgtggatgacactttccctcctggttactcctttctctgggcttctacagagttttgtttgaactttgattggttctctgtttatattgtattataaaatgtgtctgcttacatgtctatctcgctcattagactttaggaactttggcccattcatttcatctctgtggtgctaacagagttgcccagtgtaccgcattctgcaaaaatgtaattgagttagtaaatggaatagcactgaccagacctggaacacaagaagatcttcataatccagtgagaaggactgcttcctcagaagtatttttttattcccatagattgattacccagtggagggggaagtacaaccaccacctttctgccttactctgagcaggtttgtcagacaaatattggctggtaaacccaaccttgatcagcagcaagctttccaaaccacacatgaggcaattcatatgccacactggataggtctgtttaaagaataataatttcgcttgatgatacacctttcttggcactgagtaaaactatcggttacgtagatgttcacacagatgtggttttccacagaatgagaaatttaactcagcattaactttgtgtatctgtcttggcataattaacaagagcaaagcaaaggtcttgtgaaattttgtgcatttgctctcttctttattttttgcttgttattattttgtttatttcatcctaggcccattatttcctgatagaggcctctgaggacccagggctctccagagaagggaaaagaaggctagaaatcacaacgccttaatttggctccacaaaataggatccatctttagtcttcatgatttgcacattgagtacagcacaaagcttgggaaggttacaataaatctaaatttatatggtttaatgtgttgatggttacaggaagttggactttaggttcttcttgttggccaaaagaaaattcaaacaatactttgttaagtttcgcggtagattgccatttgatggacaaagttgacttgcatgcaagtggtgtatttgcaaacacacattaaacacacttcaatcccttcctccccttttttcagcaaaacttttcagtggctgaaaagagtagaagaggatagagcacagtttgatatgccccttcctagcctttggtttcatctgggctgtctgcatgttgggaatacttcccaagccagtgggaaactcgtgaaaaaacacatgagatgatttttgatcagacactaccccttaatactggaggcttataacaccaccccagatcttttcatgttaatttatgagactgtttagaaacaatgtgctctcctggtttcttgaattacaaagagtattggcagggccaacttcttatccagaagtccagtaataacaacagtaacaacaatattaataatgatattgatcgtaaggtttatttagagtgctgtttatgcagttcatgtatattatctcatctaaaccttgtacagtaggttctgttgataaaagttgtgaatagccccattttacacaaagggaaactgaagtagagagagttgcctcagattgcttgttttactttagagttattattaattgtcttaaaagggtagatggacactggataatttccaaaatcaactcaaaatttgtttgtccatggcttaaaaatcaaattcagaggtgattactcactgtccagtaggtataaatgatgagctgctaaccagtggtccaactttctatatttgtcttttcgagtagacaactgcctaagaaatcattagttagtctgccacttttgggtgaaagagattcatgagtctctcaatgtatttctgtaacatggaaatagtgaagaatcattaatttgaaaacaaagcatgacaacttctagcacattttcagtactaaggaaagcttgtggatacatgcctaatgattaggggctatatttattgtagagaacactctccattttttccccttacccttttaccagcactgctaaatggattgatttgagattcacctctttttccctgtggaggtgataatggacaacggaatgaccagagggaagataatagcataaagtgtgtggcctctgagagggcctgggaaaaatggagaattgactgtgttattaataggtcagcttcactggttttcaaaatctatgtaattgctcaggcggtaagcttttattgggtgaaaaaatgatgagagatgggctcggaaaggcttgttccacattgatgaatggaaaataagcacagtatgtgcttgcaaatctttacactattgaattagatttttgaccatccctcgctttttgcactttctgtggttgcactcatctctacatgtatgaaagttgtgttttttgaattctagggttgtaattaagacccttcagttatttgtccatggtatttctctgtaaatattattaatactgtcgaaattatgtgatccattccttaattccttcacttccctttaagtagctagactgtggcttctgtcacttctgtgttcttttgtcaccatctgctcattatctgtcaagaggggactgtgaattatttctgccctgggccagtctaatggaatccttggtggggctgtttagggaagtaggtactacttaggtgtggtagcagttaggtgaatggctccacaggcagccagctccattaccacatgaaagcaccagcagcatttggcttcctggtgaattctgtggtgtttcttctgtctatggaagtgcaaatttagctgaattgggtagaaccgaaacgcttgccctctgcaatttgctcctgaaaaatgatcaggccctataaaggaaaccttaacataccaatgtctctgctgctagaaatggcttccttgtttgtctggactacatgcatccgtcaagaatcagcctatggcatggtgtccctcttccttccctccaagtgctgaactcacttgggttttccactggacttcagtgtcactgtgttttagaatgaactaaacattcccaataaagtcctacttgtgctgaattaacatttctttattaaacaaaatatgctgcctagaatcagtagtttgagtcttctttgattactgtcttttattcatcgtcacgtgttctgtcactagtcttaggcacttaaaacaaatttctgttttgattatcctggggtcattgtaattaagcccatatttctccttccctttcatctttcctttcctgacctgcacaccaattacattactcttcctcattcttgtgctgacaatattactctccattgtttagaggatcaagtctaaactccccagtttgactttcaaggtccctctttctcaaactttccctagtctttccaaagaaagttattcttcccttctgacctaaatttaggatgtgtccccatttttatctgcatagtagccccaatgtgatgtaaaattttaccaaatactttgtctttcttttctttctttctttttttttttttttgagatggagtttcgctctttcgcccaggctggagtgcagtagcgtgatcttgggcttactacatcctctgccttccagtttcaagcgattcccctgcctcagcttcccgagtagctgggattacaggtgcctgccaccacacccggctaacttttctatttttagtagagatggggtttcaccacgttggccaggctggtctcgaactcctgacattgtgatccgcccgccttgacctcccaaagtgctgggattataggcttgagccaccttgctcggccgctttgtctttattttctgagggtaagctcatctagggtatgaaccccacaagtctgagacaggtctcaagtaatttagaaagtttattttgccagggttgaggatgtgcacccatgacacagcctcaggaggtcctgaggacgtgtgccagggtaataggggcacagcttggtttgtgtacattttagggagacataagacatcagtcaatatgtgtaagatgtacattggttcagtccagaaaggtgggacaacttgaagcagggagggggctttcagatcataggtagatgagaggaaaatagttgcattcttttgagtttctgattagcttctccaaatgaagcaatcagatatgcatttatctcagtgagcagagtggtgactgaatagaatgagagccaagtttgcccaagcagttcctagctggacttttccctttagcttagtgattttggggccccaggatttattttcctttcacaagggtgaagataatgctgaataaatgtttgaggcattgaattgaactcaggtgtgtggcctcaacctacttctgtgaaacttccatagagtaccactctgtctacctcatgtatgctacttcccattagatttaaatattggataaattaatatttaccaagtttgcacaaataactctgatatatatgaattttaaaattatctcatagaagaagcttcctttgttctctccatggaatcttttccaaagcagtgcagcctcttgctttgaaaataggaaggtagaatattccaaatgcatcataagtcctctgtttatatttttaaaacctgtactctttccaagcctctaggcaagaacaaatagaaataatcagaggccttagaacttgattatgttgaattgaattattaagctgaggcttgatagccaaattaattgtgctatagtttatattgaagagatgcttgtgatattgcaaaaccatagactagcttgctggaatcttcgaagacatctggatgttttggaaaatacaacaatcacatgctttttattatctccatgattgtattctttttaaaaaggagctgtgtaaatgatacaaacaggaagcagggaaatactgggtagaagaagtgtggtccctggcgagagccacaccctcaagcctggacccatggcccaaagtgagaacatgcatttctgttttccccacccgaatgttgccttttccaaaaccatactggcctgccctgtcccccatcctgtgcccataaaaaccacaggccccaccagcagagcagcagagcagctgagaaagacagaagagaagaagtagctggacgttggagaaaagcagcttgacttcagagggacagcttgacagtgggaccttggagaagagtttgaccagggatggccaaactccaggggaagaccaccttcccactccatcccctttccagctcttcattccactgagatccacttccatcagcaataaaatcctctgggtttaccatcttcaattcatttgtgtgacctgattccccctggatgccagacagtgacccaggtacgggtgcaagagactgtcacactgaccctccactgagctgtctaacacttaagccatccatggatggcaaaactaaaagagtacactgtaacacagggcctctgggactctgggggcttgtgggcaactcctagatgctgccatgggcctgcacggagttttgcttctgcccagttgcccagaagctcttgtcctggcctctgcacctgctcacctgtgtgctaccctgcccatgaggggttgagagctgtgggctgagtaaatgagccaaccccttcacgagtcttgcaaagagtctgaggggaatatcccatttcataaagatatagagtgaacatagagagaaggtcatggagtttggaatcagacagactagatttgaatcctggttctgtctcaagcaactaggatgacttcagcatgtttcttggtgcttgtgtttgtggctacttcctcaatttttcagtagagaaaaaataatactcataggaccactctggtgaattgttgaatagattgtgtgttatctgccacacttcaagtactagcatgcattaaaatccctatccctttgccctccaatgtaaaatgatatgaattctgtggcttacacatagctattttttttttttttttttggcctgcatagataaggcaattccgtaaggctgtgttaccattctcctaaagggcctccctgtggggccacagtacatcttgcctaatttctttttaacaatatttatttctgtggtcaagaagaagataaggtaccttagaagtagtcactgttctatctcaatttggatatgcttgttgaagaactcttacaaccacttatttctgggaaaaaaaaaaaagaaatattttcagccatctcttcacctcaaaaacagcaggcatcgtggattattggaagggaattacccagagaaagtgctcttaaaaacaactgcatgtagaggaggctggcttatcaacaggcaaaaaaggagatttttttctactaaatttcagcttgtcactataaacgagaaaatagccacattcgtaatatattctatggggacagtgctgtgagtgtttctactggtggaattctcaagtacgagattctaagaatgagcatttactcttagaaaaccctagggaatggctgttaggaatcaggtaaacaatgaaatgagagccctttcaaacagggaagcaaaaaaaggcagatcaggtaaatgagttcactgtagaccacattgtggaaaatgtgacgtgatatgagacacatttcatttagcatggataactaatgtaattacaatcagctaatgagttttgtttctttttctgcataatattaacatcatccaaagttaagaaggtatttttttccgatgaaaaccctaaagtcatgcaaaattatgtggacttcctttctgattcttggagagaagttagggttgttttagcctttacctacatttcagtttaaggcttatccacaatctagaaatgcaatgttaaaagataaagaaggatctatagaacacattttttttaacttaaaacatggatattagaacttatatttgattatatttttctttgtgctgaaggattgatctccttgtctaacacacgttgaaaatctggagggggtttcattggaaaattgtagcatttcctttattagcgacccttaaaaataacaagaataattaatctgctggtttagcttaaatttggtcttatgacaggcatgcacacgagctggcttttcattaccctatcctcctccatgattctgtcttgtgaaatcatgaatggaatttctatgaaaatatatagcaaataggttcctgacaaaattactattcacataattcatcatccttaagtgacagagatttgtaaataatgaaatctagtgagaaatctttaatttcatttagctagtagcttagaagtgattctgattccacctgtttaccagaactcctaaagagaaaatgaagaaatttaaacttcaaatcccatttccttttctttttgaaattaaaagcaccttgttgatggaggagcagtgattggtatctgtgcaaggtggtatgtgggaccatttgatcataactgatatgatgtaaggaatggggttgcctggaaaaattaggaaatgggaggggtgggagagaaatttaagaaaggcacaggcatgccactggtggaaattaccttctagtatctccttttctgtttacagtagctcttacctttctccaagggatatgtattgagtattcacaaagaaagtaaaatggctccagtgttacctccatttgtcctgtttattgttgtggctatgatgtttttggctaattatcattgtatcctaaattctttactaaatggatggatgaatgcatgcatacatggaaggatggacacatggaaaggatgaatatatataggggtttcgccctgaaataccttaagatttattgtattttagattttaatggacccgactgagattactgatgacttaattcacttcttgccagtgagaaaaggtagccatgtggtgagaaacttgaaggtgagaaccattttccataatcttttccatgtttgtaactcacatattttttatttcttaaagtttccattttgattatcatttcacttctatatctcctgtggtaggtaaggcatatgtatttatccctgtttctagatttccagagaggaaaatgaactaccaaaggtcatgtccctttctgttttgtgcatccatgtagcagatggacaccttatcaacaactcttgccatgaattggactgtcaagcaatgggggatactcaaaatatcaataggatagtgagcaggagcattaaattctaggttttatgttgcccctaaaaaaatctgtgacttctgtcaatttactgaaccttggaggcacagtttcttcatctgtacaaggccgggcagttctagtaattctctgattctcagaatctagggagcttgtcttagtggttagaatttggctctgggtttagtctacttgggtttgtaggtaccttcgctgcttcatagctttgttaccttggcaaagtacttaacctatataatcctcacttttctcatctgcatagtggggatagcagtaataaaaccccttgaagagttgccatgaggattaaataagataatccacaggaggcattttgcatagtgcctgatgcaattaagtgctcaatagattagcagatcttctactgtggcttattcagaaaaagttaaggtgagtatcactgatgtttttagaaagcagttgatattaacaggttcctatatgactgatccaactgcctgaatcatgcccaaatcattaaagctttctaaagggcagagccatcataactaatcccacaatgtcccacaggcctcttcaaagagaaaaatggcccctctgggagctcagcaattgtttcaggatgataatgttgataattccgtcgcatcattgggttttctggtgcagacaggtaagacacggagacctttgggttgatggcaagatttggagggctgattatggcgcctttgatgtgaggaggtattcctgcaatccttccgagacacctaagctgctgtaagtaatgacttttgttgctcatgtatctgatgcttctgccactgtgttgtctctgaaaaatttgccagcctgacacccaggatctagttgtagaacactgcaggagtaatggtattttttcatgtggtgctcaacatacaactcctacattgaattttaactatgggatttttgtgaattaaagactttcaggtaaaatagatacagtgaataaggtggggaatacctaagagagcagccccctttcacccattggcccttttcttttgatttggttaagattctgtgaatatctgcattagttattgttatgaaatgcgtacccagctcttctttgtagccttcagaaagagcaaataatttagtgttgtgcagcattaaggtttattggccacaaaacacagataaagactgtgatgataaaattttagaatgcagacagggagtttagtagtggccaacttttaaattcctgtgcccagtaatccacgtgctctctcagtgaggctatgctgctgggaccatctaaggtaagggtgtccaatcttttggcttcctggggccatattggaagaagaagaattgtctggggccacacatgaaacacaatgatagctgatgagctagaaaaaaaatcacaaaaattcttatgttttaagaacatttatgaattttgttggcccatgggctgtgggttggacaagcttgatctaagggttatttcttttgttgaatcctgtggggactacggacattagattcacacttttatcgccagatccaagcactgattagttatcaagtcaggagttaacaaatatttgtggaaggaaagggtgaggacggaaaggaaaaattgagggagaaagagaaagggaaaaagattagagcctacctccaataggtgactataaatattttgttgttgtttttagttttcattctgcattgtcactttgggtaaggatagagtgtttttgtgctgttgaagaaatagcattaacagatgagttttcaggtgtcttaaaactgaactctgcctataagatggacacagttgtccaaactactttaaaaaacaatagattcagttttatactcattcacttaaagggtagggtagatacttgtcaaatgtggttttgagggtttacactggaaagaaaaatctcatcaaaaatatgaagcaaggcctcccttctcttttcattctcatttggaagaaaggggagaacatcttattttagtcttttttaaagagcataacttattcaaaggctttgttacactctgcaggacactacccgtatttaagttaaaaaaaaggattcatgagtgagccagcaatcaacaagtatttactgaagcctcatataccagaaagttcaaagtgctagtttaaatggtcttcctaaggtatttaacaaagtcatgtcacaaaatacattgtagaagataaacatttatcagtgagtcatcacagaccacaagtgcccttacaacagagtggacgtatgtgcttcattttctgatatattagtaaatctgagaaatattgtccaggttgtataggatgtacagtattttcattgtctttaagtgccagcggactacagatggctctcagatccccttggatcacttctgtgtggtttgtgtacctattttgaatcctctagtcttttcctgaatcgaaacctcacattccaattaaaattgcttagaaattcagctcacctgatagggttgagaatattttcttctcaagttgtggtttctacttgatcccttatttgtaaaattgaattcactgactttgatctaaatagttagggttgtgaatattagtctaggttttaatctaatccaaggaatggttacttctctttagtttttcctttctgattataaaaatagagagttgtgctatgaatttcaataaacagcctggttgggagaacaattctgtctgtatcattacaggatgcccattaagagttgactcaaaggtcccttttccctgtggctgaaggtggtagtttgccgtcctgcagagtcagtggtggcatctgtcacatgccacttccgcagaatgcactgatgtggattaaagatctataacatcatctaataatgcctatctattggagataggcatcactttgatagtataactttgggccttagagatgtggtatgcaagttagaaatttgattgtactatgtgtataaaagctgtttttaaagaaagagctaaaatctaaggtggtagcatactaaagcttagtttcttactttaaatatcacagtagattcagatcctgacttatgaggccaaaaaggttagcagtcctgataaccttgctgtacatttagaaatgaactagtcagtatgtgagaatatgcatagattcctagaagatgttacacatcagcagatcagcagtgtattagtctgttttcatgctgctgataaagactacctgagactgggtaatttataaagaaaaagaggcttaatggactctcagttccatgtggctggggaagcctcacaatcatagtggaaggcgaaaagcacatcctacatggcagcagacaagagagaatgagaactaagcaaaaggggtttccccttataaaaccatcagatctcatgagacttacttattcactaccatgagaacagtatgggggaaaccaccccatgattcaattatctcccaccaggtccctcccataaccggtggtaattataggagctacaattcaagatgaggtttgggtgggcacacagcctaaccgtatcaagcagtttaactatttctctcttatctgaaatctattttattttattttattttattttattttattttattttatttttttagagatgaggtctcaccctgtggcccaggctgatctcaaactcctggcctcaagtgatcctcttgcctcagcctcccaagtagttgggattacaggtgtgaggccctgtgcctggcctctctctgagatcttaaaatgaatctggtgaggaaagaagaaaattggaagaaagccaactattaaaaactagaaaacacttttaaggacttgaggaagaaataagcattaagacgtatacatgtttctaatttctagcaatgagatgttagtatagtacagacggaaggcatgtaattaagaaatttaccattaagttgggaaatcctatcccatgaatacagatgttttaggcttgcataaaactacatggaatatcttcaatgcaataataataagcagtgctgtctggacatttaaaacttttttaaaaagtttggtatcctagagacaactatatagattttgcgagaaaatgcccactgggtcattgaaaaataagcttataggggtatatgcatggcacagtaatttcattggtaggagatttcttttagatttttagcttgcctttaatgggctctatcctacatcccaaataccttcttttcttttcctccatttcccatacaagtagtgatgtgttaatttcaaaatgttagtgataaaatactgttgctaaaaatatttcagcttgcctgggcttgatctggggaggacacatgtttctgggagagaagccacattcaaccctgtaatgttgtgtatatgctactctgcagggcgcacctatgccaagaggcagttggagaaaatggctaagctggttgtggaggcagactccctgggttcaaagtctcatttttctacacactggctaactgtagacaagttacttatttctctgtactgtagttttctcatgtagagcctggagataagaccaactttataaagttcttgaggaattaaatgagttaatacatagaatagtgcttggcacatggtatatacacaataagtattaactgttgctattagttgtcagtaatgccttgctagcacaatttctgtaccttttgtgatattagtctgttttcacgccgctaataaagacatacccaagactgggaagaaaaagaggtttaattgggcttacagttccacatggctggggaggcctcagaatcatggcgggaggcaaaaggcacttcttacatggcagcggcaagagaaaatgaggaagacccagaagcagaaacccctgataaaaccatcagagctcatgaaacttattcactaccacaagaacagtatgggggaaactgcccccatgattcaaattatcttccactgggtccctcccacaacacatgggaattatgggaatatgattcaagatgagatttgggtggggacacagagtcaaaccatatcagatgttatgaataaacctgcaaaacacagagaccctcttactaaggtagaagcttaaaaaacatgactaatttccagtgtttttttttttctgaagctttttttaattagccagctaccttactagtttgcaaatgccttaagagcaaggttcatatcatattcatcttgtaatacctctgccgcacctaaccgagtattgaagtgttgaattaataaatcttctggaatttcttgtttcttcaggttacattaggaatatgaagtattatgaatggggcacctagattttcaaaaaggagatagaatagatggcatctccactaggcccagatagagtataaaaacaaaagcacggcaaggcgcggtggctcacgcctgtaatcccagcactttgggaggctgaggcaggtggatcaccagaggtcaggagttcgagaccagcctgaccaatatgatgaaactaaaatttagtctctactgaaaatacaaaaattagccgggtgtggtggcatgtgcctgtaatcccagctacttgggaggctgagacaggagaattgcttgaagccaggaggtagaggttgcagtgagccgagattgcaccactgcactctgcctgggcaacaagagtaaaactccatttcaataaataaataaattaattaattaattaattaacaaaagcaaactaaaaagacacttctcagagctactttgcttatgtcgctagttcatggtagaaggaaaatggtgactgtagaaatggtcaaactgggatctttttcaggaaatgaaacacgtaatgtagacttctgtggaaagcatccatagacttatgtggaaagcatccatagacttccgtagaaagcatctgtagacttccgcagaaagcatccgtagacttccgtagaaagcactgatgatgttgtataaacagaccataaggagattgaagccctccatgtattctgtttgcccttggaatatatgtgcatgtgcatgtgcttgtgtgtttattttcatttgggtttatgccctatttttaatttgtaagcagaacaagaggcaaagggctctcatatgcccgtagaattatatagtcaggcttttcaggaattttttttttaatccttcaacatttatctttgcatcaaaaataaattttttaaaaaaagtaaataaggataaaagaaaaaccgagtaggtgggagagaaggaggaatttggagtcatgggaatgggcaggtgttcaggtgatttaaaaggagaagtaaaggcatgttcctggataaatgtcgatatgcattattaaatgaaacagtggtaaaatatagactgtcagaagcatttttcttccagagacatgaggagaattgaaatgcagtttcaaaggaggagtctctttcggtgtttcttcaatcatttttttgtttgaagctttaattacagtgctccttgctacctaatgctttcagtttaaaatgacatcacaaaagagaggggaagatgtaattgctcagatgaagggcagccatcacagcagcattgaggtatttactcaccagggagttcctgctacatgattcttttctagatcaacattttgtttttggaatgcttttgtatcatgcatatttgacatggtttgtctttagagtgattgctctgatactgctattgccagagcagataataaccttcgggaaataatgtattctgaaataaaggaactagttatttgcatagttttctctggattggataatgtgtacaggtggctagtggcttcctaaacgtttagtgttctaatcaaataaacttgtatttaaatacattaacacagaccaatacacgcacatagaagcacatgtgtacacatagataggtgcacatgcatgtgtacacatacatcactgtcatagctcttcatgcagaatactttgctattcagccccatcaacacatactttttgaaaatatgctcagcagaggggtacaagcatacagaggactcagaccccagtctcaacttcttcacagtctgatggggacagacttgggagcagagatgctatgatgggggaggctgtgtacattgcagcctgaaaacagagtagaagaggggccctttctccttcgggcccctgggaagactccaggaggtgatggatgaactttgagctggtcattggtgaaagaacatggattagctgagcagaaaagaagaaggaatactggatgcagtaagtaaccactttgggactaaatttacaccaaaatgagtattagttcctttggttccaaatggttcagatgttctttaaaggcactgttcttactgcccagaggaaagagagtgagctgaaccatacatgcttgtagtaaagattgtatgtatgtcatatatgtatatctatatataatatatctacccatgattatacgttgtctataaagccccttcacacttttttttaacctcatagcagctcagcaggtcagtttaatatgatcattatttttcagctaaggaaagggaggctcacagagatacatggcccagtttccctccaatgatgttctgggactcactgctcttactcaggtctgtgctgcccattacctccgtgaggttagatcacaggttacaagttagatctctgatatccggatctcctgatggcattagcagcgtttagtcagtgactttcctgggcctgcctggatcactctcacttcatgtggatgatctctctcaggaagccatagattttgagcaaaaatgcagacttcccagaggctttgccgggtcctccatctcactcccctcaagaatttcaacaaatctgttaatgctattttgtcatttctgtacttcaaagtgtttctgccaggcataccttgtctgtcccagctctgactctttggggctgagtaggtttacttgtttattttttggttcttacatgtctccaactccatgtggatttacatcctactgggtgaggttttgtttttccttgtgtctataggtgagaagatgtgaacatacagttaattgaaactaagtctagaatcatgaagccagaaggagaaatgtattagaattagaaatgacatcacaggccgggcgcagtggctcatgactgtaatcccagcactttgggaggctgaggagggcggatcacgaggtcaagttcaagaccagcctggccaacatggtgaaaccccgtctctactaaaaatacaaaaattatcagggcatggtggcacgtggctgtaatctcagctacttgggaagctgaaggaggagaattgcttgaactgggactcgggaggcggaggttgcagtgagccgagatcgcaccactgcactccagcctgggctgcagagcgagactccatctcaaaaataaataaataaataaaagaaataaataaaaaataaagaaaaaaaagaaatgacatcacaaaaaagggctggctcctcataaagcagtcttcacacacagaatgtatgctgtgtgaccaggaatttgtagcagctgagaaaccatagttgttcataagaaaaaaaaaaaaattagaaggcacaatatgccagtatggctagcctgcctgcgttagggtctcagtgatgctggtgggaaacctaaaaaaaaaatgtgaaaaattttcttttcttcttttcgtgcaattagatcttcttgactaagaaaaaatgcagacaagcaattactccgttactttaattactctcctaattataacgataaccttgtcacattatcataattccccaaacagaaaaacgcatgctccaaattgcaccaatatttgataattttaccttgttaacggctcactgtcagtatgtagagcactacattttttccccattacctttctattgcacagtctatatttctttgcctcagaaaatgataatacattctgtacaacatgtttgtgttgcacaaccccgtgatttgaatatggctttttaacgtctcgcagtttcagaagctatctcctgagcagtgtgtaattctctcctggctgtttgatggtaatgggagctgtacatgtatctggagagaggagaaccagcctgggggtaagaaagtagctatttatcaaggtatcttacaatctcagtttatgttgttgtaaaatgttattgtgcacgttccctgagattatatccgctagacatttgtcagccattgtcaacatactgtaaggaataagcatgtgtattattccagtcaacttaattttattctgcatttctttgccctcattttcaaagagactgactactggggacccttgcttaatggtgccatctgctaggttatgaattgtacagaacgaatgttggaaatgttctagaacactcacagcaccctggcaggtagatggcaaggcatcctgatgcacggctcctgccatcatggaaattctccctccgttattacagcaaatgatactgttgacagccaataaagttacagaatgactgcctagaatacaatgataaagtaggaacgagataaaatagaatcgtaccagaagcctttcccactagaatgtcaaattgcccttttttaaaaatgtatcataaagtaaccttgaaaatcattagttctttagatagccccggtctttggtaaaattatgaaattctattgctgtcattgtctttgtattttgttgttgttgtggctgttgtttggttttagtgcccctaaaattccagagcttctcatcctcacatctatgtgacacttctgtcacttccatggacacattccctcatttcttttctgtccttaagctttcttaccaattgaaactggtctcaagataagttgaagactctttcccgctacagggaatatgactaataccaatgcttagtgttagttttctgacagtttttacactttaaagctatgagtaaaaccttggactaaatgcaggcatctgagaaagtaagtaacaatgccgtggaaggaaaggcatcacttgtttacacacctggtcaccttctttagtccatgggactcactcatgtttccaagagaatatttcatttccacacagacatagacatttctgacagttaaatccaaagtaactcaaatgctacataacatttttacattgttttgtgtgtttcttgggtgtgtggcatttggcatcaagaagacccgtgtttcaatgcaatctctgccacattttggctgtgaagaccaaatgcaggttatttgacttttgggaaactcagtctcctcctctgagaattgaggtttgtaataccaactcatgaactcattctaaggatcagatgagataatagatcagaaagagtaggtgggtctataatgttagttacttgaagctggttcccaaatctcctcctaacccacctttctttctttcttttttttttttttgaatctagactcaagatatattaaagactatgctcatggacatcaattctttcctgtcctttagggcagtattcaggccacacggttcaataacgggaaagaatgtcgtcacatgattgcatcatgttcttcaaaatgaaatctattgaacagtataaacaacaaagaacatcatttgtcagaatgacctgggggaaatagtccagtgaaactaagcaaagggaactttataccgtgagggaaaatcaatggattgtaacagaaccctgcaagaagagacatagctttcaagttccagagacctagaggtgactgagaagcaggatgtaccagaaactgggcttcttgttctacttatctagcgcccttttcacagtgttgtatatgtaaataaataataaagcagtgtgatttttaattttttttttttttacttatgtaaagttagacatcaaaaagcatctgttggacctccactccttaaaaggaacacatactaagtttgagaattatggttctctgggcattgctgcctggcaattacagaagcctagggaagtaggggttatcacagttgttcccaggtaatatcacagtagttacccctgtcaccagggccttacaaccacttcctaatggtgagattggaatgagactggatgtgtctgactccatggtctatgttgtttaacaaatgccagatacattgagtcccacacaccttgtgttagtttgttctcacactgctgtaataagctacctgaaactgggtaatttatgaataaaagaggtttaattgactcacagttcctcaggctgcacagaaagcatggctggggaggcctcaggaaacttacagttgtggaagaagggcgaaggggaagcaggcaccttcttcacatggtggagcaggaggaagaaagagaagagggaagtgccacatacttttaaaaaaccagatctcccaagaactcattcactatcatgagaacagcaagggggaagtccacctacatgattcaatcacctccttccaggccccttctccaatgtggggattacaattcaacatgagatttgggtgcggacacagcaaaaccatgacttggctcagatctcttacctccaaaccctagtactttatgtaatcttaaaatagaaaaacagacaaacaaaaaaatagataaagttgacttttctctcaagaaaagtgaaatgttctatttcctcttaggtggagaccatgagtatgtctgctatttgtacataactcaatggatgataattgatctaaattccagggaagacatgagagtttaaagggagacactcatgtagaagccctagtgtgaaagggcccctacatttgacacttacgtggacagccagaagtcagggcacttgtcctcttcctacatagatgaacttattaagggaaggagagggtggacagagcgttttgcttttctatggccctgttttgaatgttgacatggcagaacaccaaagtggcacttggctacctgctcttctctgcctgtacatagggaatatttcagccaaatggcattgttttctcataacccacgaattgatttggccagtgactatgtattactcgaatatgtattgcttggattggcttcaattgcctatatcagtttagaagctttaacaatgtttaacccatatgttgagtaaaatttgggagtattaaaagaaacactggtttacctcattttagtacaaatgaatcgtcttagagaaatagaaagcaatcaaaaattaaacaagtaaatacaatcaccagtaacccgggttaaaaatatatttaggtaattaaaagcctaagtcattacatttccactggaccaaccaagattgttccaaatgtattcgtggaagatttattaaaggatattttgacattggcaaaagggctagttttctggtgggttatgaggctctcagataacatcaaaaggcagtatttgaaagtaagattctgtcatgcacaccgttttctgtgtcttttgaagacgtgggtaactctattacagaaaaatactactatacctagcatgattgaaacaaactgtatgtaatgtaatgtaatagttcttaaactgtgcagcttcgcatcctctgcaaatcagctcctacatctggacgatgagaattgtaatagcactgatctcaaaggggtttttggttgtgatgtgagatagataagatttatcatgtgatcactagttttatcaagtgaaggagataagagactcatcctatgatcactagttatcttggctctctgccttaccatttctatgatagcaagaaaagagcaacaaagttatgaactctgccagtcttggtatgcaatttgtaagatagtatgtataacagtcagtggtacaaagccacagaaatcctaaagtgttattttaaaccagatttccattttcgtcacctccattcctttcagggatcttgggaaagggaatgaactactttactttgaaaaacagttttgttttgttttattttctgaacgaagataatgaaagccttcctgacccaaatagcatatgcagcctggagtgtcatatattgtttttgcataggagtgatattaataacctgagtatgtatgcagtcatcaaaatagcttttgtcataacatcacttgtgtgctgctatttgtctcataagtaatctgtcacattcattttaagttgaagtgtggatatgtgacaggtggaatctacaattgttttattgggctggatgtaaaaataatgaccttgatgttgctattcagaatattatgtggcatctgggaccccgatagtttcccaatattattaatagtgatattactacctctccattacatgcatggttagtgatcaaaattttttttatttatttaaatttttgaatgattttagaaaccatatgcatggagatgtattaagatatataagcttcttgtggtgaggttattggttttaaaatacacatcgttagcttttaaaataaaagttggcatttcgagttgtcatgcttgaaagactcttggaagtagcattaaaagaatcctagattgaaagctaatttaggtcaagagggaaaatgtgcttgatgtgacactgataacttcataccaattgaatccatggggccttggaacctgaaatggaatttatgataaaatacccaccatgaggtcttatcttaatggagaaaacacattgctttgttagtcctccagacagaaacttcattgtttggggaatgatttcagtagaggatgaaaggatgaataagcaaaatacaccgatttttttgtcaactgccacccctcccaccccgatgttcccaccaatcattagaataagaaacatgagtctttgtcctctgccaaatctaagccatgccaacaagtaaacctgtataggaaaatgacacaattagggaaatttgcaagtgctattatgccagcagtagttttttccatgaagtaatctgatgattcatacactggagatcaggagacaaaacagattctacctggttagagacccactatcacaatgatacttggcctaattcattttggttgagggcctgatgagccacacatgcgtgggtcagggaagatggttttcaccggatgcctgttgagtctgattgtagagactttcaagagaggattttattgaggaaaaaaagaagcaaacataacaaagtattattctgctttagactgaaatcagggactgttttctgagaataaaatgacttcataaaggaatcaagaaaattatcttgatgctcagcctgtaagataatcaaaggtaaattctcaagttgaatcctaaaggaacactcagtcctcttaacttccatggttgtgtgtgtgtgtgtgtgtgtgtgtgtgcaagatagaaatttctgcagctatttaggtgaaagcactttggaaaatgcaatatttcgtattcttcagtagttgatccaaatacatacggtggaatatacaaggtttatattcctggcctggttgcaggggaagaaagtgtcatctcgtggctgaaaaatagtctcagtgttggatactatgaaatcttcagcatgaaaaaaaaaaaaagaacatatcccttctatgtattagcttcccaggaatgaagcaaacataaatatttttcagtttggtcatttgtgaattagtcatgatgaaaaagccttccgtttctgccagatgaagagtaatacagcacagaactttgaggcagtattaatatttctgttgtgcctaaaaagtaatcaacatagtttccatgggtcacacaaaatttctcatgattgaaacagtgtcattgaaagttgggggaaggacacatcggttagaacatatttaaatgaaaaatgtatttatgctttcacttcaaggtaattttatcagaggggctgggtttgggggaagatacctgcaaacacgtgcataaagtttgggcttcatgaaagtgggtgaaagcatcatatttgagctgccacatttgacatgtccccctcagaatcccatggacactggacagtttcctgaacgctgtggtttccccatccctggtgggtgtctgcttgtaatagaagctccaaagatacctggaatctcgaagcttccttcggcatcttcctttattagaccaacttgaggctttctagaaaagcatacactctgtgtttgcaatgtgtgtgtgtgcccagttgccacattatgctggttaagagcatggattctggagccagactgcattggcttatatcttagctctgccacttcttcaggagcgtaagtttctgcatcaccctgcctcagtatctttctgtacaatgcacatagttagagtacctgctgttagggtgtttgtgaggattgaaagagttagtattgtgaaaggcttagaagagggcctagcacacgggaagtgacttacatttttttttttttttttttttttgagacggagtctcactctgtcacccaggctggagtgcagtggcacgatctctactcactgcaacctccgccttctgggttcaagtgattcttccgcctcagccctccgagtagctgggattacaggggcgcgccaccatggccggctactttttgtatttttagtagagacggggttccaccatattgaccaggctggtctcgaactcctgaccttgtgatcctcccacctcggcctcccaaagtgcgggattataagcgtgagccaccgcgcaaggcctgatttttatttttttctatagagatcaggggaatgttaacttcccctagaaacagcatgacttgccgtcctctcagcaggtgagttacagaaggcctgtagagtaccacaagaaagaggcctgactacttatttggaaattagctgtttttgttctgcttgtggagggttccttgagaatttggccctttccctgttttataaggggacaaataaagatgagatagggaagtaggggtaggcattgcctttgttcatgggaccttgctgatctgcggggggatgattgctgggggaagatcatggggcttggaggcagagcgcatagttttggctccagttctgccctaggtaagtcattcagtgtctcgctgaatgggctgagttttgctttcctgcttctgcacttgaaatgcttattgtaaggagagtgaacatggaaatcataaaatgattggacaggctcaaggaccatgtgtaaggcgttaataccaagtcagtggtcattgctaggtatgtttctgaatgaatttaattttttttctggtataacctgcagttggggattttagttaaaaaatgtgctcacattcaagaagcctggaccagctctggaccaaattgcacaagaggtggtgtttgggcttcaaatccagttcctgcttttttgttgttgttgttgttctttttctctttgttttcatgaacttcttcagggactcaatggcctgatcctgcactcttcgccccacaattaatgaggccacttcactatggagcccaaccttggctgctctctctccctatttctgggatctttacctttcttctctcacctacttaacttttggaaacccagttttactacgtgtaacctggagatgccattacggacttcagaagttaacatatgtggtatgtaaatcatctagcacagtgcctggtgtatatcagccgcctctctctgcctctcactcattccgtctgtctcctcttttccctcgtctcccttctcttaaggatttgcctgccaatctatcttttattttagaaatcccaacggtggtactgatggatcagtaaaccctttcatgatacatagtagcagtttcctagtgactgcaactcttcactgaaacaaagacttcacaggtggtggatttttaggctttgtgacaaactcgtgagggctctttggggacaaaggaggacattttagccactccagattaccatttttgcctttgagcattgttctttaatttctcctagaaagaaaagaggaatctgcctgaagcagctctgccatccgccgacacccttggcagttgaacactgattgtcaagcccaccgtgggcaatgcaggtttccttttgccagcctggcatggagtgaaggggaagtttgtgctcctctggttgcctcagctgaccaggaaaccgtaccaggagcagcagggagggcagagtctagtggagtcctctgtgctgggactgtgggaccaggacagggcaaggacagcaggaaggaaagaccaactcatgcagcaaacaccacccacactggatgcattcaactcagtccttagagataaatgttagagacaaaggcaccattaggaaccaggacactggacgtgtactttagagttctcataaagtctgcagacagtcacagtgaggaatgcgctgtaagaatttcagatgaggtttattttgtcccctagccctttggttatcacggtttgttttggttttagcagagctaataaaaaatacatttatcttgctacacagtgatgagacaatagcagaataccaaccctgaaatcacgttattaaagcattttctttttctgtgcttttggagggattttgcattagccaaaaaaatgatgacaagtgttgtcatgaccaaactttcttttaaaagttttggccagattgaattgtaggatcacgttaacatgacagtgggtcttagtggtatttgtaagatgttggtatggccattttgtctaccacagtgttctttaaacagcctttctccaaatgggcatatcgtctttcagccttacagaaatcaaaaacagaaagtgacaagctttcacaccaaataagactgtgtatctccaccattctgttctccagcttctgatattaacagccatcacccaagagggtagagctgttattttgacacataaattgtaccctgggctcctttgaaaatgttctctggttccttgtcaagtttgcattgaatattaaagatagaagaccttggtttttataggcatcacattccaactccaaattagattctatgtgaggatattgtaaataactcagtaaacacatatgaaaattgaacatgtaacaattcaacttccttttcattttaggaattagaattcatagtcttactttcttaccttaatctgattacagtattagaagtatccaaatgactttacatttagctatcaattattattttttaaaacattgcataggtgtgcttcagtttgtacagttaatgaaagagcaaagagtgaagtgcatagttttacagacttttttaggtttgtatttccctttaaattctccttatttttatttattttatttatttatttatttatttatttatttatttattgagacagaatctcactctgtcgcccaggctggagtgcagtggaatgatcttggctcactgcaagctctgcctcctgggttcatgccattctcctgcctcagcctcccgagtagctgggactccaggcacccgccaccatgcctggctaattttttgtatttttttttagtagagacggggtttcaccttgttagccaggatgttctcgaactcctgacctcatgatccgcccgcctcggcctcccaaggtgctgggattacaggcgtgagccaccacgcccggccaaattccccttattttttaaaaaaacaactctggtggcttaatgtattccattatacttgccttttctttgcactttactgagtcaagagtttagattttaaagcttctgttacttaaagtttatggttttcagtagtgttgcatttggatgatggtaggtggtgacagtagatctagggtcctggtaacattctgaagatttgggactcggggcttttcttcatctgctttgctcaagactgagatggtttcaatggatatactttacttcagccctggatgatatctgtgaatgtgtttctgtagaaaacgatgtcatcttaagaatcccatcatgttaacttagggtctgctatcatgtttttatattctggaatttctttgagaatagaaattatcaccttatataatagtttcagaaattttaacaaactataaaaaaaagttgtggggtggggagaatattgaattattaggtggtcaaataatgtataatatgacattttcacttaactgttgacaattggcagcatgaagagtgtaaccagtggatggggtgattgatgtagacataaggaagaagaaatggtttgtataatctctgctgttcccttcgattgacatgctcaaaggctgcctataccaaagattgattccaagaattagaattaaatgtaatcattgttagtccagtactgaatatttcctcgatgtgcttaccatggtggagtgggaggaatcttatttaggtgggctgtggtgggtcagcatggggacagagccaaagggaggcacagcttctctgatttcctgtgtatttgatatccaaagaacacagttaggacctttttcgctcatcaagtgtctcatgatgtggtgtgtcaaagctctcagtggctcttgtttctcactacggtgacctaaaccatttgtcaagagataccattgttttgcattcagtgaaatagaaaggtgaacatgtgtgtatgtgttttggaaggatgggatagtgccagtttactagcaatttcctgtaatctgcaaccagtcttacctatgcaaccccaaatattttggggtccagagccttgagaacgatcactattattatctgacagctgcataggggtgagacaaaccataaaatgttgagaacccccagcctagacagctatggcctcactgttgtgtctggcattcactgctacaaacaacacaaatcatgtactttatatcttgaagttgtcactcagccctgtgttttctcatttctgtgtctttacttagatcataaacctaggatttccttttctctgcttatctaagtcctactcctctttcaaggccaatcttaagtggcttatcttccatgaagaattcccagactgttttaactcacggtggttccctttttctgggagctcatagtcattatcagttataccactttgggctattcatcaggagctgccgtgtgtacttttatgttcttttgtagttgttatttaactgtcattttcattaacttctcaagcaggtatgcgttatctcctcaacccagacatggggagcaggacagtatatccagtaattttttgtactgtctgcataattattcacgtcccgtattcatggcaggggttgttattaagcatgtgttggctaactgattataagacagttatgtgcagacagtaggcctcgctattcttttatagctcatttttcctgcatgttgctaggcacagagtaagttttgtgctttagtccctgtaagtatatggtgactggctgacccactgggtccacagaaacacacattcatgcttctcattcaatacatttcgtgtgtgccttgtgccctgcttgtggaagatagttcaaacatgttaattgacttactcttcatagtagccccttgagttagctgctgttatttatattttacagatggctaagggacttagagagtttgagtagcctgtccagatcttatggcctgtggaacctggatttgaacacaagtctgagtaactctctcaagagagagtttttgtcactcactactttccactctactgaattcttactacatacatgccacacttcagttttttagtcattcctatctctgattagtcacagttttgtgtgcatacatttctttgtgagtcatcattttgggcatagaactgggttgaaactcatagtcagcaacccagatttgtctatcatatcctccatcagaggaaagttcctatcaatgtaaatagagggatgggtggcaagttattttaaaaagctgatatatcacagagaaaaaaatcctgctaagagagggagaccctccctctcccaccccttcactcctaccccacacatcacactcacacatcacacatatcacatacatcacactcacacatctctctctctctctctcacatacacacacatctttgggagcaaaaagtaattgagttttatttttaggtcagtgcaattagatttttctttactcgcttttaatattatattagctttctctgataaaatgaagaagcagtttacgcctgttgaggtaatttctgaatcagatgtgggtttctttatgctccaccatgattggccagttgctttgtaatgaaggagtttgcacttcagctaagcctggaaaaatgtctcagctccttctactgggtgtgccaaccctttcagctgttcaagacacaggatgtgaggaggaattgtttaacggtgacagcatggagtaaattctgacatcaggtgtcaggggttctattcttggttttgtttctggactgctaatttagggtgagaatgattttcccctcagcgtcctcatctgggtagtgaagtagtccaggacagtatttttgcagccattatttgggtttacatgatctccttttgacattctcaagtaaaccctgctttaagttttaagacttttataccacatctaaaggctcagtggagtgagttgagccatcagagaaatctggcttgttgtgtcttcctcatttcttttgattagtctgagttgccagatcattttcaaatggctgtgcatcaaggctcacctgggagcttgtaaacatagtggtgcttggcccgtaagaggccggatccacaggggaaggtcccagtagttcagattttcagagttcttcccaggaaaccgtgaagcatactagtgataagggcatctgggctgcaccattaaccagctcaaaaatagttcattcagaatttccccatgactatttcattattttgttattagggttgatagttttaatacataaaaatagaggataaatgataatattttatatataaataaaaaacatatatgtataatagtatatttaatacataagaatagaagataaataataaataaaaataggtatatttgaatttctgataatgcatattcttgcatgcatatgtcccacgcaatattcgaatcttgttttatcttgtttggcaatgcttcatgccatagagccaggaaaatctcaattctttcacaaaaactaatgcagagaggtcacaaaggaccttgagacagagggtttgtagaggctttggtactgcccattaaaatgtattgagtccttttgagaaccattatactggaaatttggagacgccttttcaatttttggttccttttcttctctttctgttgcattttgccagtgcagcattcacttttatttcttaaataaattgaagattttttttttagagtgttaaggaatttaaccacatggctcctattaagccatcattgcatacagaaatttgttacaatctttctcatgtggatactgccaccttctcctaaactgcagagtatcttgatgtgaggtgtgtaagaaatctaagacctcctcactggccaatttgttgtcttcacaaatagttattctttcaaatagaatatttcttactgtagttaaattgtacttctttaggctcctttggaaaaaatttacccaggacataccaaacaaggtaggaaaccaaggcattggccattgttcaagagcaaaccaggtcagcaccaacaaagtcgggattcatttctattgaaactgatctctgggtaccacccacagttattacaaactgactcagcaaaaaaggcctgtggccattcgaaaagcaaatatttttgctttggcttttatttaataagttttcaaatgtgattttctaggcccctaataggcacacttatcttgtgaatatggcagatactagcacagagcctgcaatgggggttgtgattgtcaaggatctgctgcttctgggtgctttggggtggaatgtgggtggatggagtaagggcttctgtgactgagaaccacattcctctctgtctgcaggtgaggacagtttgattagttcttacaacatttttttttttgcaaactcaaaaatatctactaatacttctgattttccaccttaaaatattgttgtcgaaggaattaaggagttctgcagctcaaaaacaaagtgttcccaaatttacttacctttttggtaagcacatgttaggttggacctggggaaataaaacagttgtctgtgttgggtcagacacagtggtgatcccaggcaaagggtagtcagtggggaaatgagatgaacagtttccttccctgaggccccaaaccactgttttgtaaaaggagcattggaaatccttccctcaactgcacttttttttccatagggcaaatggactaatgaataaagaacaatgggcagcaatttaaacctctagaagagctgcagagagtgaaagtgtttaggagggaagacagaatgagcctggctttgttgcccttcacccagctcctgaagccctagtctacagctaaatgccttcacgtctgtgtgtcaaatattcatctgtaaagaagtgataatgccacttacttggctgggctatggagaagattaaagaaagtaatatatgttaagtgcctagcacaatgcctgggaggggtatagcttttaaggagttcagaaaaccttaattccctcttgcctttaaaactccatttgtgagggtatattctagaattagaaagggtacttattgcactaactcgttaagagattgttcatggacttgtttatttatatgctgtgttttctctgattaataacctactttggagctcaccacgaccaagcatgaggtaaaatgatcttcctttactcaaaatgtgtgctatatttgaaattctggctgaccgtggccgcctcaaaaactcatgacctcagttatccgggtttccttcagctctagtgctgttttaattataagtatttacttttttttgtttttctttcgtggcaagagctgtgtatttccattaccatggttatcttctgatgcctcaaagtatttggctgttttcctttatttaggcataaaggcagagacattgtaatttgtccaaaagtatttgctgtctccaaacagtagacagaatggcatacatttatgaagtgctaaaccattaccattgttttgtgtttggtgcttgcaaactgggagctttacatgttattaaaagctttcaacaccttcttctcctcctttgaaaaataatcagcatattgcttgcctccagcattcttttaaggaaagccaaagacagtgtttttcaatttccgaaaatctaattccaaatgcaatggcagtacacactggttggaccttttaggggtaagttaacaagctgtttgtcctatttgttttcaaacccatttcagatttgcagctctccatattaaaactagttgcttgtttggtggtggaaatattctattgcattggagaaaaggtattgtagacacaccttgaaagtattccaaatgtacctgaaagagcattgacattcagccatcagaggggagcagaaattctgctggcagaccccaaatctttgacatgaaattcacaaaatgtgcacacgttttgtatttctatttagaaaaagtggaaagccagctctgcccatgtgtgctcctgatcttaaatactgttattcttctaaatatagttcaggacatttgtcagtgaactgtgaagctattgttaaaaataaaatggaaattcaaacctcaaaataaacgatgagcgatttgtaatgcattaccacttgcggttttcgcttggggttggtaaatctgaggcccatggaatcccattttgggggaaccctatttaaatactgtagtaaaaggcttttgaatcttataattctggtggctacttttgcatttgagtagaaaactacaaagctggattgatttttcaaaaatgtatttttatattttgtcaatatatataaaaatggaggagaggaagtgaaatgattcattttagatgacaaatgaatccattttcccctgcagtgctcttacaaaattcctgttgacattcaagttaagcacatgcatgaagaggagaattctagtcacaagctcactgctgctgtctctaaaaggagatgcatggatttttgttaattccctgcagccatgctccctttcaagactctgttttctaggcagtctcctctcttttagtctggctattagcctctgaggactatgccctaccttccatgtgtgttttcctgattattttttttttttcttttgagacagggtctcaccgtgttgcccaggtcagagtacagtggtgccgtcatagcttgctgtaatctggaactcctgggcacaagtggtcctcctgcctcagtctctcgagtagctaagactacaggagtgcaacactgcacctggctaaggttttttgtagacatggagtctcacagtgttgcccaggctggcctcaaactcctgtcctcaagcgatcctctggccttggtctcccaaggcactgggattacaggtgtgagctaccacactagggcctgatttacttttttattttttttcactgtcaataggacttgcgcgagaaggtcgtgagcagactttggcctttattcaggaaatggctatcactgtctctggagattgtgtcaaactgagttgagcaggaaagggcccaatgtttctaatgttgcatccactgccacctttttgttgtcacctatgcacaaaaggacacccagtttgttgtttaaagtatatatatatttatatatataaaaatatctgtatatatatatttatatatataaaaatatctttatatataaaaatatctttatatatatttatatatatttatatataaatatacgtatatatatttatatattttttatgtatatatataggcacctgtgttttagcccctagttctccatgtagacatttagaaatttgctaaatattctcctgcaacagtttttgtgtgacttgtgccagaccaaaaaaaatcacaggctcactatattaactaggcagtgtaaaagcatattgcaaacattattatcagaagagaacaactttgtaagtctataatcattttgaatactaatggcagcaataacaatggtaactgatgggtgataaaccgaggacggatggctaagtgctgtctcggagaagtcagcttataaatcagaggcagagcacagggaaggaggacaggcctgacctcaggacaaagctttcaaccctgacacaggcaaagaaaatagtcatcgtagcatcgtggggagatacgggttgagtgatataataaacctcttttaaggaactttctgattttttccgcatatttactttacgtacctcaacccagggggcattctttcaccaaaggagtattgcttcaaattgaataaatgcacacacaaaaaaatcacaggcagctctactggatggtgaaatatggctgccttgtcatgagaggagttaactgagtctcattgagacctggatggccatccctgctcctcaaaccagaaggcactccaaaggctggagatgtcttgcaaacttgggaaatatttgagcagcagaaacacatctctcccagttggagtctcaaccttctgatccaccccagcacccctgatagaaatcagctttgggaaaacactttgaattcttgttttgagacgactggtgtctgcagtgaatctctgttcctctcccaccctcccttctggataaggtcctcctttctgccagccctgttggacttttgtttctccttcccccgggagctgcctttgaagtcagtgggagctgtgcagtgggctggtgagagtgggaggctggagtgggggaaccaggcccagatgcaatctatgctgcttactgggattatgggtttctccttctccttcctttttatgtatttatttttattttgaaatgtgtgtcttctcttggctaaaataaagaccgggggaattggtctggctttaaagaaccctctggagccagcttattcatacagagttaactgtgacaagtagccgccaccaaagccacaagtaccaggatttggaaattggacataaacccatttcatttatgcttaggttatttgggaggggtggggaagggctggaaagtgtcggaaaatttataaatgaatcctgttgtcctctcttttctagtatctcgttttccagccacttggagcaaattaatttgcctctcagaaccccaattttccgtatctataaaatggaaataaaattcttagcccatggggttgttttgaagatgcaaacactgatattcttaagcactttacatagtttctggttcattttaactgattaataatttgaattctttgtcattatcaagactgtatttatgagatggcaagtttctactgaatatgtaataagggcttacagggcaaaaatgacagggctgtctttaaaagcgatgccactgggatactagtgaatacttctttgtgaatatatccaccaatactctagattgggtcaggggtggtcattccatgcacagggtattagaatttttttttttttttttttttttaaataagtggttatccaaaggggttgatgcctgggtcatttggagatttgtccttgaacattctccagtctggcttgggttgtctcagttttgtcactcagatttgcatcttgtctttctttctgtttttagttgcttggatttctcccaaagtatttgtggctgaaattccttttggactctgagctgccttttttacataagctttggattggaatcaatagaatgtcaagatgccaggcacattcagcctaatagcaggtgggtgtctgctggacagtgtgcctggtttgcctgacagtagcaaatttaggccagaattaatgagccagggaaggtactgttggtgttgcaagatttttgcagttttcagaagtaattttgtttttcctttttaatgggattttcagaagttttcagaagtaattttgtttttcctttttaatgggattacatttgcaaaagaagtttgtgttcatatatgtgcgagtgcatgcatgcccctttattataatacctttatgatggcatcgaggcaatttatttttagaaaatagtattcacacatacctaaaaatctggttcataaaccttaatagagtttcgttaaagttaacggtttgtcttagtctgtttaatgttcaaagagaagaaaacacccaaaagtggagtgaattgctgaagtttcttgtgtacacttattaggacatattcctgctatatgatgagctatcatcagaaaacagtcagcagaagccaggtcatgtgggctggtgaggaaaggaaatgggtgtagagcaagcgttcctgtgtttctagcggattgagaaaaatgcctgccttttgattttctttttcctctggggttttacttatatatcaaggagtaaaaaaagaaatccctcatttatctaggtgcttttaaagaataaatgtggaaatgcaagtaaagtacctggtgtacatcctaggcattccaaaaatagtggcgttctggctaatccgaagagattagatgagaagtccatagtgatgattcaggtttctttcatgttttatatattagctggcctttttgtttttcttattctttatcttgcaacaggcattcgcttatttcggcttttaatttctaacataaactcaactctgaaacccatgccttctaattgttgaccacagatacccttgaaatttgcgcgaccgcccacagtgggatggtattaaaacattctgatctagatttgggcagaggatgaataaaatggaaatgaggcttatgcaaattagcttcccatttgtttgaagatggtcgagggcagcagcagtccttgagtcttccagattttagaacagagcaagcagtgctctgaatgacaagcccttggcttcacgtggctcataacaggataccacttacccccagagaagactgacctctatatttagtggtcaaagaaaggaaaagaattgttggatgctaccattgagtcctagttcaaacagtttagaaaactaccacatctccacttcttggagcaatatggcggttgttcccttcccctaggttcacagcctgagtcttcgtgggccttcatagcacaagtaaaagaatattaatgttagaagttgactccagaatggagacttccattttcttctggaataaaagattaaattatctctataaagtagtaacattatatacattcttacaaagtttgttttacagtattattttaaatttatagaaatggattgtatataatgaaattatttatttttattcagggaaaatgtgtatttatttatggggcttatgagattggtgccccaaagttcttgacccacgtttcatttgagtaaagcttggtgtaaggtttggaatcattttgtagtgttatttcttaagatctttccacccacagttaggacatgtgacacatgtgattctatgtcatttcatttcaacttgggtcttacttagcctttgaaaggatgaaatcctgactctggttgacagctgtgtctgtaaacatgaatgcagtttggtattaacttttatctttccatacagtgaggggcatggaacagtaccactaacaatgggaggtgcttacataatgttaactaccactctacaatctgtgtgatataggaggttgaatccatatgtagatcctgctcttagatcctgtagattgatggtaaagcaaaaacaaatggagcgttgatagaattctgttgagtagccatatgagcattattctgatacatatgaaatacaaccttgtgattatatgatatatgtgtttgtatatgcatgcagggtgtagttgtggtttgtttcaatttaggaacctctgtgaaagtgacggaaagcttgaatggagaccctaaggaagaggtagaaattacttgttcaataactcttagaggtctttttcaatactactaattgattgtgatttgtacttagtgtttgtttgaggcattgtggcaaagtggtcaagaagtctagaattaggccagtcagagtttaaatcctagcatttattagcatagattttgggtgcattatttatcctctctgggatcagtttcttcatctgtgtaatgggagtaactggagcatcgaccttataatcctactgtgtgaattaaatgaagacatctcaaataaggtgcctggtacgtagttaggcactcagtaaaccatagctattgccattataatcattactataatatgtataatgggaataataattagtctatcttatggactaatatagtccttgtatggattacatatctagctgtttttattattaatttaggatgacagcacctaattttgagtgttgttaagtagcggctagcagaaaggacctcattttataagattctgtgtaggttggagatatatacatatatatccaactatatatatatatagtttttactatatatttctataattttctgcctcattgtttgatttcacagctctggaggttaaagctaagctacctctccactctcctgtccctgcccttatctaaaatagaaagccatctgaaagaaaagaacctagggaaaattcccatgtgagaaatgaaattgtccttgtgaagggttaggactctaggaactgtgtgcagaaaatcgttgaaagataatctttataggatgctgaaaattactggcagggatcaactctgaaggttaaattgtctctgccagtgcctctaacaggaaatacaagggagatttatttatttataatgtccaccttcattttgtatactgtgttgtaatacttagagaaataaaggtaatggaaaagaataggtaaagtacattcattttgttaaatcagaaattcaacaaacagtcttaacccattcagaagccttgcagctggtgtgctgaagtggccagatttttcctagttgtagttgtcaaggagttaatccattgagcaactgatgagcactctgtcccatgaacagaattcaaatgtggattaaagcaatgaattttaggaacagaacgctcctattttggcaacagttacttgagccccaagtacttccagaattaagcagtagatgctgtggagagacgctcctagcacagccctggactcctacaggataaagtcaggatcagagctcctggtccgcttaaagaatattccctcaaggcattgtgcacggaaggagatataatttactttacataacgtggagtgctgcatgttgattgccatgccctagaaagagcagaggcagaagcctcctgaaaatcaggcagaaggaagagaaaatgggctcttcttaaactaatcagaatctgaaagtggatatatggatgttttaagaataggtggtggctgaatgcaaaggtgcgcctgtaatcccagctacttgggggcctgagctgggaggatcccttgagcccaggagtttgaagccagcctgggcaatgtagcaagacactgtttctttaaaaaaaaaaaaaaaagactaggtagtgattggcattagtgtttggatctgcctctgtggttgcagtagaccgtctttattcttgcaataggatttatttatttatccctcagagaatatgggctgcctcacttcctcaccagtgagtttgcaggctcaggaaagctctacaattaaattgctctattgttttaacctctctgtttaagcactggtgaactagggctccttagctacttgcctagcaaaatgaacaagttgattaatatttgcacaggactagaaaatgccttttttgaatgagatgggcacatatggctgcatagtattgactcaggacattgcacttatttccttgtttaaataattagcaaaagaaatcatattaaaaaatgctgaaaggtataaagagaaaaatgtgatggccaatcaaagctgtgaacggcctttcttatgctgtgtcttaattctgtatttctgtaaagcagtaggtattgaatgcctagatggagtggctcaatacagtcagattttgaggcttttccttagacattctgcagttctttctcctcttggtgtctttcaggacatgacagtatgccccccagagccacagaggacagacatccttctctgggcctccatgcctgctcctctgcaaacagggcaggtcctgcccgggctgagcagagaatcgcttcctgtgcagttgctggccgcccctgcagatgcagaaccctgacacagggttctaagtggtactgaaagctgctttatgagccttgcagaggcggtgtgcatgtgtgcagctgcacatctgcgagaatactggtgggttcaggcaacgctggccctaccttagccaagccttctgtgtgggagctatatgaggcttttgtactcttgcttagttttcattgcaaatggggccgtatccaaaaggcatagagtgggggtgggaggtgggtggcagggcggggggaaggtagaaatgatggataaagatgtaagaaggataaggagagaccagatgcagtcgagggcttttgtggcatgaggaaaggatatttaacttggcaccaagaaatggggtggcattctaatgctgctcctgacctcctgtgtgaccttgagctccagtttccctctttgtaaaatggtggccctgatgactacctacaaggttggaggtgggaataagggacctaatgcatgtccagtcatctgtcatcaacactcaataagccttttcctttcgtggccatccatcttcaggtttgacggaagtgaggatctgccctcagggttgaaaggtcaagatggtttgctcaaatattttatttctctcataaatctcttgcaggtttggttcatcccagactattctttttcagggcagtatttatattgtcactgcgttcaggctgccttccccatttgatggggcccagcagtgttcagttatactgataataccaaaattatcttcattttaaaaaatgtaaacctttttatttctgatcattaatgtaaggtaagtatattgttgataatttggaaaatccaaagttaaaggataaaattactactaattgtaatctcagcacacagaaagaatcatgtgtgtgtgtgtattatatgcatgtgcgtgtgtatagagggcattctatttgtattgtatttctttattatttagggttgttgatactgtaaaataaatgattttttttgagaatgaagatgggtgaaccttgtttttctcatatttaactaaatctaaatgacaggatatttggtaaaaggagatataaagctacaagggcccttgcggcacctgccatgaggtctgtctaggtgaagagctggggaaccaaagatgagcagctgaattttctgttcttgatgttctgcgggagtaatgatgcaccagatgataatgatagaagatattttgataatttacttctttgatattggctctacatgcttttaattaagtatatatatttttagttaaatatgtaaatatatttcattaaaagcatatattttaatgaaatatatatttaattaaaatatatattatacttaagtgatataagctatatacagtttttatatagtcagtgtatatttattatattttatataatcagtgtttatataatatatataatacacatatgtatatatattacatattaatataaatatgattaattctaacaactccatgattttatctttatcattttatcttcattttacagaagaggaaaagaagccacagagaggttagtgaagtaacttgtccataagtcacacagcagtaaacactggagtcaggcttcaatcccagagcactctggagcctgagttttcttacgtactctgcttactgcactgacaatactgatataagaaacaatgttcaatcaataacatacagtttcagctatggaaaatgaataagttccagagatttgctgtacaacattgtgcctatagttgagagtactgtattaaacacttaatttgttaagatggtagacagcatattaaatgttcttactataataaaatgaacacttaaaaaaagaatacttacaattgatgctttataatcgtgataaaactcactcatatttatgtgccaattcttacacagtttaggaattgaaaatacggtattttgatatatataggtaaatatatgaagtaaatatatatgtacacacacacacacacacacatatctcaaagtaaaaaggaaaaaataaaaaaggtctttgtttaggtttctgttttagcaactgaaattttaacgccattcaggcaaattctcatgggcatggtagatatagaatcagtttagtcgtgatcctgtcatttgtacagtggggtcatgctatttctcaaagtcagaagaaagaagttcacatacaaaaggttgacgtggaaagataagctggttttcattgagcttaggtggagctggttttcctttatagaccagtatatattctcctgcttggccatagggaaattacatgctattttatacacaattatatattactttctacaaccagtatctaacttgatatttagcccttggctctatctaagacaaaggtattgcaattgcccattttaccatcaaacgaggaagctttgttgtacttcgctttcaaaatgatccttgaaaacctacacacatacacacaccagcacttacattcttttagtatttcaggaagtgggcatgagtaggtttgagccttgaaactgctttgtcatccagtttgtagctggctaaggaatggaaaaaaaaaaaaaaaaaagaagaaagcagagctcatcttgatcattgtaattggcactgacagcaaacaccagtgtgccaatagcgccaaagaattcctacgcaaaagctacttcagctgtccgagattttcctgatttgttttgtttgtgcatttgatgtataatcttgtggtttggccctcctcaccacctaaaacagaaaaagcatattcagttcctaggtcattttaactggaacttgatcttcaagttccaactatgtcaacaaattaaaggacttgaccatgaattttttttttttctaagtgaacactttgccattcctcaaaccctaccgcaggttcagcagacacatgtaagcggcctctttagatgtggtcaccgttgacagctcaaaagaacaaaatcaaaaccctgaagactttacataaaaactcatcgttggaagaagagctcgtatttcaaagatgatattaatatgagaatattttttaacatcctcttttagcataaatttctcatgattaaaatattacccacaatgctgtattgtctaatcacctggttagtaagatgtctggaactgtggcatggtgaatgatgaggaaatgttctgggggactgcttttatttcagcttcttttttgtttgttttttttttgagatggagtcttgctctgtctcccaggctggagtgcagtggcgcaatctcagctcaccgcaatctcggcctcccgggttcatgccattctcctgcctcagcctcccgagtgatatttcagcttctttcttattgatgatgatgatgggattagacaaaaatattgcagaacgaaacaagtgtcactatttgagtcccgaatcttattttcttcatactattatacacttaaaattagtgcctatttttgtctcctcttatagcttcttctcctcacatcttgttaagtgaaagacagacgggccttaatattactaagaataataaaaatacttccaattcaataaacatttcagtaactggatgaaggtctttgcttgaattgtctctcgtggtaccctcatctacccttcaaggcaggtatgctgtgttaatgatagtattactcaaataagacttggccttctagaaattaaatgacttgatccagttcctatcactagctcagtttttttttttttttaatttttactttttttgggtacatagtaggtgtatatatttatgaggtacataagatgttttgatacaggcatgcaatgtgaaataaccacatcatgagaatggggtatccatcctcttaaggatttatcttttgtgttacaaacaacccagttatactctttgagttactttaaaatgtacggttaagttattattcatcatagtcaccccgttgtgctgtcaaataggtcttatttgttccttttattttttttctacccattaacgatacttacttttcccccaccccagcccctcagtacccttccagcctctggtaaccatctttctattctatatgtctatgaattcaattgttttgatttttagatttcacaaacaaatgagaacatgtgatgtttgtctttctgtgcctgctttatttcacttaacatagtgatctccagttccattcatgttggatgggtgataggatctcattcttttttgtggctgaatagtgctccattttctttattcattcatctgttgatggacacttaggttctttccaaatcttggctattgtgaacagtgctgcaacaaacatggggatgcagatatctctttgatatacagatggccaacattttctttctttggggtatatatccagtaatgcaattgctggattatatggtagcttaatttttagtattttgaggagcctccaaactgttctccacagtggttatgctaacctgcattcccaccagcagggtacaaaagttcccttttctctgcatacttgccagcattttttattgcctctcttctgcatataaggtatttttactggggtgtgatgatatctcaatgtagttttaatttgcatttctctattggtcagtggtgttgagcaccttttcatatgcctgattgccatttgtgtttcttcttttgagaaatgtctgtccaaatcttttgcccgtgttttgattggattattagcttttttcctatagtcgtttgatctctttatatcttcttgttattaagccctggtcaaatagatagtttgtaaatattttctcccattctgtgggtatgtctcttcaccttgtggattgtttcctttgctgtgcagaagctttttaacttgtgatcccatttgtccatttttgctttggctgcctgtgcttgtggggtattgatcaagaaatttttgcccataccaatgtcctggagattttcccctaggttttcttatggtagtttaattctttgaggtcttagatttaagtctttgatagattttgatttgatttttgtatatggcaagggatacaggtctattttcactcttctgcctatggatatcaagttttcctggtaccatttattgaagagactgtcttttccccagcatatgttcttggcacttttgtcaaaagtggatgcgctgtaggtgagtggattctctattctgttccattggtctctgtgtcagtttttatgccagtaccacgctgttttggttactatagctctgtagtataatttgagggtaatgtgattcctccagttttgttgtttttgctcagatttttttttttttttaaacataacattatagaccttttgagctctttgttgtaggatgctgagctgtgcatcatatgggattttgcagcattcatggtctctccccaccaaatgtcagtagcatccccagtcaagactatcaaaaatgtctccaacgttgccaaatttccttggggtgggggcagtgaggcaaaactgccccctttagaatgactttgctagccgtgtgacagagcctgggaatgccctagacgaatttccttcctcttaacccatgtgctgtacaatacctgtcttcttgtcccttctgttttttcatctgagcataagagtttagaacttgaaaagcaaatcactaatgtctgctttttcatctcaatgataggtgaagtgcattgatgaatacttccttttctctttgtgggtatagtaaattaaatcttgtatagagatccatgtattgtgaaggcagtagtatttgcacagtatcatgcatatggagaagggatagagtaaggatatttattttattttatttttatttttatttcatttttttgagacagagtctcgctctttcgcccaggctggagtgcagtggtgcggtctcggctcactgcaacctctgcctccccggttcaagcaattctctgtctcagcctcccgatagctgggactacaggtgcccaccaccatgcctggctaatttttgtatttttagtagagatggggtttcaccatattggtcaggctggcctcaaactcctgacctcaggtgatccacctaccttggcctcctgaagtgctgggattacaggcttgagccatagcattttttaaattgctcacctctctttcctaattgtgtgcttgggatacatgttcactgagtcagacttctaatcactctttcctctgaatttctgtgtggccttgagtgagtcactaaatcatttgtatttcttctttatcttttttgggaaagcaaacaccatcttctactgtaatacttttacttttgactttggagggtagcatgatagtaactgcaaaactctttgaaaggaattccaagacatccaattcattgaaaagcaaatataatttttggaaaaagaaagcattgttcattggaattaattttgcagatgaattagttcatttatcagccatcaatcaatatttaaaatacggtaagaagaaagccaggaggtagtaacacaaccccttcccaggccgttttctcagggataggccctttctcaagccttggagtcactgaggattgggtaaatacaaaaccactgtagaaaaactgaatgaaagcacgcatcagtagtgactggatgttggtatcatccactcatttcatagaagctgaggacacatcttgcccttttccagtatagatatgtttgaagtacattgtcttgtgggaatgccttttcccaattagaaatttggcaatggaaaaaaagatttggcctctgaagttctgaagatgcataggcaggggacacaccacagccctgcctcttgcttgaggaagttacagagcaggttgtaattaagcacttgaaatgtaacaggtgaatccttaggtgactgggaatcccatcacctcaaccctgcaaaatagccatcaaattgcttttgccaattagtacatgaaacagctgaaaatataacaaatctccatttatctagggcggtaggcaactaaatgtttcttcttaactgctcttgatttattgagtgaagtgaggtggtgttttgtctggtgaatacatagcatttttactgcttaataaatatttcatgagctaagccctgactcttatggatgtggagaataaagaggcattatgcttatatagaatgctatataattttaatatgcatttatgtcattgttttaaacacataaacagtcaagaaatgaataactccatgaagttgaaattaacaaagtaaattacaaattgactttaaaagtgtcacattaaatacttttttccatagttgctgattttaccctgcctgcagtgggtcgttaaaacagatgtgacaggaagaaaacaaaaaaaatattttataagttttttttaagtgataggataaagttggttttcttgtgatggtagaaaagaaaatagaaaaataagaaagtgtccccagagaaagaaggtggtagctcccctttcttctgctcgttacatcccgaaaaccacatcctggttcctctccttatctggcagcaattgggctgcaaattgtgggacacgtggtaaatgggaacctccactcacctttcttttttttatcaggtagatagaactgatagaccatcctgtttggtggtaaatatacgtcaactctaagaacaaatggggtctggaatttgcaaagaagtatcaccattacttgccaggtgaaaatctggaatcagccgggtgcagtggcgcaacggctgtaatcccagcactttgggaggccaaggtgagcagatcacctgaggtcaggagtttgagaccaccctggccaacatggtgaaaccctatctctactaaaaatacaaaaattagtcgagcatcaggttgggcacctgtaatcccagctactcaggaggctgaggcaggagaatcgcctgaacccaggaggcgaaggttgcagcgagccgagatcgtcccattgcactccagcctgggtgacaggagcgaaactccgtctcaaaaaaaaaaaaaaaaaagaaaaaaaagaaaacctggaaccgcatgaattctgtacctgttcatacaggataccatgcagagtataatggaatatttggagctggagaacattctacattgttggctccatgtgcacagggctttctttgtagtcattctataatattttcaaattacatacatgtttaacacaatattttcaagtaatagtttcaaatcagtggattgaaaatgtagaaaagataccttcatctactgtacactaatctcaattcacatttggatatgggtaacatttccttttcttcttaggctaagtaattgccaccaggttatactgttttttaagaacatttaggttaactacaaaagagaaaaggaaacagacattttgctagatgtttatataattttcctagattaacttttaattttttttgaagcatgggttgctttcaaatggttaattttaggcttttcctaaaattttcagattttcctacaatgtctgtgtgtccagttctgtgtgacttttgaaagtccatgaaattaaccactatctcttgcacataatgttcaaactctttttctcagacctcaccttctggctgcagggccagtaaggttaatttagagcatgtcatacctttcacagggctcttccttacatatgattgaaactctgttgattgaaaatgtgttgagcccaaatctgtgagtgccagtagggttttcaatgtcatgtactttctgaggataagaaccaaggtattgttgggtatttaaagtctatctcagagccaatgaataatgttttacaaattcttcactctttacaacattgccaaccttctactgtttcttttggctatttagcattgttcgtgtgacagttacctgggcatttttttcccctttaattgaaacaattttataactagctctgagcattaaagatacttagcatctgatatttaaaaattatgtttttgtgtaattccagaactctgggagttcaaggcaggcggatcacttgaggtcaggaggttgagactagcctggccaacatggtgaaaccccatctttactaaaaatataaaaattagccaggtgtggtggtacatacctgtaatcccagctactccagaggctgaggcaggagaattgcttgaatccaggaggcagaggttgcagtgagccgagatcatgccactgcactgcagtctaggtgacagagcaagactctgtctcaaaaacaaaacaaaacaaaacaaaacatatatatatgtatttaaaattcctagtcatcttatatattgtggatcccatcatatgtctacttatttagaatattcaggtccaattatttgttaataatttgtttttaaattcattaaaataagttttgtttagtaatgttaaacatacactaagcatataatatttaactgttattgcttaaatattaaacactctcagttaagggacaggaggaaaaaattgtgtaggccttgatcagtatggctgggaaggcctggggatttgtgttgtgtgtggaatgtgtgtacacgtctttgagtttggttttgtgtgagtgagtaaaacttcatcaaatagccactcccagagatgtgtgtgtgccgctccctcatacctgtaagtctcaactcacataccctaggtgcggcttagcttgactgtgactatttaaaccttggccctccaccacaaactctaaatctctcttaccccagtaggtgctcaataaacagttgagaactttctccctgagctctgaaagaatgagggtctttggagttgttttaatctcactcatttgcagttgagaaacacatgttttggtacttttgaatctaaacccgtctcctattcaattttcctataatcctcataaaaactaaagtttacttaatggagttgactcttgaaaaatgctggagttaggaacacggaccctctgcacagttgaaaaatctgccgttaccttttgactcccccagaatttaactactaatagcctattgttgagtggaagcctcaccaataacacagtcgattaacacatactttgtattttatatgtattattgacagtattcttacaataaactagagaaaagaaaatgttattaaggaaattgtaaggaaaatacatttacttaagtaaatgtattaagtggaaatggatcatgataaagttctttatcctcatcttcttcacattaataggctgagggggaggaggaagaggaggggttggtcttgctatctcagggtggcagaggtggaagagatgaagggtgaaggggaagcaagagaggcaggtacacttggtgctacttttattcaaagaaatccacatataagtggacctgcatggttcaaacccatgttgttctagtgccaagtatacttccataatgcccaaagtcattaattaataagagatgtgttttataagttagaaagaccctggctttgggagtcatataatcctaggatcaagtgctgatgtttacagtctgtgtaaatttaagcaaatgaatttacttaactttagttttaagataaatctcacaaatgggctagtaataatgacctacaagaattttgtgacaattagcagtaagatgtgaaaaaaaaaaaaaaaaatgcccgacaaggtgcttggcattgagaaggtgctcagtaactgatttgcatacatttcaagtatatatatgtgcttgtttgttacatatgtgtatatgcacacagctatgagaaatcatggattcctttcaaaaatgtggaagaaagaaccctttgaagtctatatgaaaagagcttaggaattaatgtcctgcttttatccacggtataactgcctaccatgttcaaagggcatcgatagaattaatattcaaaattttctttgaagccctgatacagaaggacccggaagtaaaacccatagctatttctataggggaataagttctcaatatcaagtaacagacccagtgggaaaactaggccatttctggtttgctatgttttcttgacttcacatatatattttcttggttctgtgaagaagatttggaagggttcacttggcgggcaagaagtgatcgtgtttctttgtctgttggttggagttgagctgtacaagtcccctggggcaggtttggaggtctttgagatttctgcaattgggattggactggttttcattccgattcagatgggctgtggctgcatctctcaggaaattacggttcactttttgaccgtccaggaagagccttttaaaatagtgatgcccaaaaaacaaacaatgactccctgcatagggcaaggaggctgcatctcacccaggggccaggaaacaggcgcccctgaacctttgccgttgtttgttttcacacgttatcttctcttccagatctggagactgacatagaaactgtcctcgcggatttaggtgcggtccattgaattaccaccaatactcatcttcacaagaatcttaaatagaatcaggcgtttctgtaaatattgaaacaactggacatacacttttcatgtcgctctgttttcctttctgaggagctccagcacatttgttagctatttgtcatgttacgccttttacaatcatggaccaaaacagagattagacactaatgtaagacagtctttgttgtcgttgttgttgttgttgttgtttaaatgtggaaaaaggattttaatgtgggaatttattttctggaattgtccaatgtacaaatagataaaataatttcagaggtagagattctaaagtaattgaacccatcgtcttgctaaagacttttttaaaaaaaacattttcattatttaaactctcttagcctatcatgatggtacctgggagaattcagagtttcacaggtgagcagttactgtgcatctggcacagatgagaacatgctagttgcgccttgttatggggtgtgttgactttcaattgattttaagcacacttgaaatggtaatgagaatactgagctgggagagagcatatggccttaacgatttgattctcagaaaacaagcaaacatttaaaaatgatagagttttctgagcgtcaaagtcaaggtgaaagctgggtgtttgaatgacagaaacgatttattctttattatctttagctgtgcctttattatattttattgcgttgagatgaaaaaaatagagaggaacaccagcatttgctatccaagtttggatcaaattaaatatgacataaggctttgctcaaaaggtatgacaactttggcgcttttgaactcaaatcatcctttcaaacaaaatttaatatgaaaaagtcaattaaaatataataaggaaaaatgtagctcaaggagctggaaaatgagagaatatatatcaggccatgagagaaagatgaagagaaatataagctgttagggcatgaactacatttatatatacaatactccatacatattctcttattaactaagacaggtatgtgagaaaaggagatgggcgatttagagaacgttgatttctttatgagaaaatacatcctattacaaacatacgtggtaagtttgtctttttatttgttctacctgattttgctggctgccattaccagctaaatggcaaagtctgtgagcttatttttttcttaagttgctctattttcttgattagaagcttgatactggaagtaacaagatgtggtcaactttatatatatatttacttaagatggagttttgctcttgttgcccaatccagagtgcaatggcacgatctcgactcactgcaacgtctgcctcccaggttcaagggattctcctgcctcagcgtcctgagtagctgggattacaggcatatgccaccttgccccgctaaggatgcggccaactttaagacatttatttggtttaaacaacttgtgaggagtccagtctgttcagagacacaattacttctacttctgtggaaatctaaaaacatgagtgaattatgtggaaacgtgtggcttcaaattgtatactgatagatgttccagctgagtgggactgctgagatgatatattctgttggcatgcctttatacccacaaagtggtttatttacagtcagaaacataattgtctgcagttgggaactcatctgagctgatctcagttttcaaactctttttcttatggcttgcctacacttgtcactatttccttcagttgtttcactcaaaactgtcaatctagtcacttcatatagacacatcccacatctaatgatgaaaataatcattgccatttattgagcacttactctattcaggccatttactaagtaaaaactttgcataagtaggctcatttaatctttataagcttgttgcaaggagattttggatcggagttgttacacgatttgctgcatgtttgtccagcactcattaatgacagaggaagtgttgggacatacaagtctgtctgactgcatttcagagaaaagggaatgatggagtgggattgggtgaactgtgtttcattcatcctggaattaaacagatttcacaactgaataaagccattatacgggaattctaaacttagattttcaagtgattttggggtgcagtgcacaagtgacaccagatactgggagcagattcagaaaaccaagtcttctctatcatccttatcagccctttatgtccactgaattcatcgtagggcttggcttctgatggtgatgttctgatgctctgagaagttctttagaagtttgtgtgatcacagagctgcttctaagttggacctcataggattttcgagctgaaggaaaccttagatgttataaaattcctcttcttcctgttacggttttaatatgcaatcctagataaatgaagtgacaacacttcccgttagtgacagaactaagacaaagatgtaggtcttcggaattcaatttacctccttctcctattcagacagcctctctttaaaaagctgtgttgtgtgataggtttgatgatgtgcaacttattttatatagctatacattaagatgaaataagagaaatgggatggtttttttttttttttttttgagacggagtctcgctctgtcgcccaggctggagtgcagtggcacagtcttggctcactgcaagctccgcctcctggattcaacccattgtcctgcctcagcctcccgagtagctgggactacaggctcccgtcatcatgcccggctaatttctttttgtatttttagtagagacaggttttcactgtgttagccaggatgatcttgatctcctgacctcgtgatctgcccgcctcggcctcccaaagtgctgggattacaggcgtgagccgctgcgcctggcctttttttttttttttttttttcaaggtgacaagtattgcaaacagcttttgatcctatgaatcactattaactcaataggctaaaagtatttgcaaggtcagaaatggccatattttggctgctgcctctgtaaaccactgtgaagaacaatcttataagtagggcgctaccaaagatacaacatatttctcttcctaattcttaaagcaaccatgtaaagtaggcattgttattcatatgtaccaggagaaaactgtgacctagtgaagttaaattactttccagtaatttcagaatattcaggcattgaacactggtttctctaatgtgttttcctctataccacattggattgaagaaagaagttttaagttagtcagacagcgccatgtacaactaaacaaacttaagttgtaccttagccattaattaatctttaatcagttcaattactctttctccttctctctcttttctttcctccccccgtctttccttctttcctccttttctttctttctttcttccctttatcagttgattaacaaattatacgtgtattttacaggtgaagaaaccaggccacaggaagattaaataacttccccaaggtcacatagctaggaagtgttagatctgggatttaaatccaagatccgaataaaaaggctgcatacagccatggaaatgttaaatattattgtcacaggcagtagaaataaaagttgttaataggacagtatatgatgggcacaatgataccttcagaatatcatctgtaagtaattgatggtgtttagagactggagacaaagagatgtgacgcaagtgcagttcagctcatttatgggggtagctataaataaaggaggagaggcatgtgagcgatgttgtaaaagaagaattgacctcactaatgattcatttgggcgataagaggaagtagtaggaggcagcataggcctctttactgtaacaaaagatgttgatgccattggtcaaaatggagaagtcagaaaaagagcttgaaagatttggtttgaagttccagatggacgtgtgtggctgtcggtatccatgggtttggaaatgcagggctaaatttctgatcagaatgttctaattgggttaaagatttggtatccagacttctaagattaaagtggtagcatttaatcatgtacatttaatctgtgtactgaggaagaggtgcttggaaatagaactatgaggactgcccacgtttatgtgcagggaagaaaacaggcatggtcagaaaaaggaagactctgacaggacatcagagaaactgatggaggttagagcttggggaaaataaacgtggtcaagagaatctaatccttgcagagaagtcaaggcaaaggaaaattgaaagagaccattagattttctattatgaaattatattgtggactttttttgcaatttcaaaagtatttcaggagagtataagctggattataaggaaccagggagtaagaaatagagacaatataatttacatggaagcaaaaataaaggtggagtgggagcttggggaacttccagtgctgggaaagagtttttggaatagtgaagacctgatcctctttctcatcagagaagacctggttgggggtcgagtctgtgacttatgtgttatgctgcacagagtgttatccattctaactgcttaatagatgttcgttgaatgacaagtttagtctttatcaagccaggagatagataggactttcatttcatattgtgtaaaaaatagaaataaataagccattggaagtcgtgtcctacagtaacaggagggtgagagggagattggatgaggggcacaagctgaacctcagaaaggagaatgttcagctgaccagggagggactaaggtacaggaagcagtgaagatgtagggatggaagctgaagtgctgtaggtagtgtaggatgagatagaagggagatgcagcatggaagaaaccaagtgaaataatgttgccctgggcaggcggtaaactatgagtccaagccatcagggccgggttgaactcaccatggactagtggaccattgttgagccattttttaagcattgcttacaagcctctttgaactttaaatgacacagcatgatcctaataaagaggttctggaacacagccagacttccaggactaaaattatgcccaacatcaccagttccctggggaggccacaggcctctggataatggaagacagcaggctgtcctagcagctggtgaatggcaagctgcaatggattaatggcttagggagcaaagccctgaagaccttcccagcccataggaaaaagcacaactctggagtcagaatacttgggtttgaaccccatctttgctacttgctaactggacaagcttgagcaaagtcctgctactccctgagcctcagtttggtcgcttataaaatgagactaatgataatacttgccttagagagatgtgaggatcaaacaagatgcatcagagaaaactttgtaaattctatgcaaatattagattttaaataattataattattactggtaaagtcacagagatgtggatagctaagaaagagtactagcagaaggatttccctgtgtctgacatactcagctcaaaaatgggaaactttcccttgaggtcaccgtggaatgttttgaatatcaggttctagaaatagttgcttctggaagtcaggtgggagtgttcattgtctaccaccaacaatgattattgatctgtatgaaggagcagccattttcacaatagagaattgctttttaaccatatctaagcctgtgaatacaatttgttattatttatttataatgaagggtagtaaagtgtctgcttagatatatagtgacttataaatgcatttgcacatatgtatttacatatgcactcttatacatacgtacaccctgtaaatgcatgcataaatatgcatgtatattacacaaaaatacacatgtacctacttgattttctttactgtctcctgacaaagcaatctattcaaattcagtttctcaaagtaaccattttgctaccacaaccttagaatagtccctttgctccgacttggagttgtcactgcagaattattcctggtacactactggctttgctccctgcccagcttctcaattggaaggcgagatggcacttccgattttattaaagcacgctggagctcaaagaacaaattggagaaatcaggattgattacgttatgtgctctctttgtcttcctccgggtttgttcaaagccaagtgtgagctttcaaagccagagtagctgaatggagttctatgctcagcacagggaactatgatttggcaaatgttccaattatgaagagtgaaatggaaagagtgggcgtaattttgctttaggaactgcaccttcacatcagtgatttttgccctgttaactgaatagatctggcaacttattaggaaacaagttgctggagtgtcacaaacggatggtgtcttctttgatgcatgtgaattctttgtgtaggggacccttcatttctgtttaaaatggaacaaataaaccatttggaagaggtattacatagaaatctactataaccccagaataatgattacctctgttttagggtttcgggtttttttgctttgttttgttttgttttgcttttggagaatgggggcatttgagcgcataacttccttctttacatctgatggggaatgtgaaaagtataaatgaagtttatcttaaatgccctgttctcttcaaatctttcaaatattccatttaaataggatctttctcttttgtgtctgggtataattttgttgatacctctttggcatttatgaccatctgccttaaattattaattgggctttcatccttgccgtcctctctcctaaataatgtgcaagcaaggactttaactgatttatttctgaattccctgaaggtacttggtacaagctgcaacagagaacaacgcctgtagagctatctacagagaacagtagatagaggcccctttgtgtctatgggaaagaggaaagttgaggttccgggcatcgattatgaaggagaaaaaaaaagatgtgtcatgatgctttctagaataataggattgactgaataactgatagcttcaaaaccagcatataaagaatagctgtgtctgactgctcattgctgagtgaggttttctgataaggatgagataaggtcaggtaaataacttctgataatagatgatgggatttccttttcattcttacctttctttcttttctgtcacatcttgttaggtaattaagacctggattgagaccaggcacggtggctcacccctgtaatcccagcattttgggaggctgggcgggcagatcacctgaggtcaggagtttgagaccagtctggccaacatggcgaaaccccactctaccaaaaatacaaaaatctgccaggcatagtagtatgcacctgtagtccctgctacttgggaggctgaggcacaagaatcaattgaacccaggaggtggagattgcagcgagccgaggtctcttgccactgcactccagcctgggcgacagagcgagactcaatcttgaaacctggattgagaatggagaacagatccgaaattaaatgtatgcatgtttctggataacataaggtaacttttccttgtgtcttgagagtgccatttttactgtgttaaaacatggctgctttaacagaaatggaagcccatttctgttgctttcttcaatatcattttgatgcactgaagaacttcaggaagccatcctacctaaatctatcccaacctgtcttactagttagtgaaaacatttttgtggagtatcttgagggtgggatgggttggaaattgtcacatattttaagattgaaaaggagcttaactataatctgctttgtctcctttcatgctggtgggtggcatgacgcctaggaaaggtaagtgatgtgtctgccttagcggaacattcaggagtaaaatcatgacttcctgagtcttatccagatcttcctttacttatgcctatttcctctgttttcaacatttatatattgcctggtaatcgccaatgtgctcattttatttacgtgactagattaccaatttactaagcactcgaatcatatctttgacttcttttgagctcccaccatctagcccaagtctttgaacatcataattcacagtagtattgttcactttaaggattaatgattgctgtgggctgcatttgttttcataaattgctctgggtgaagaaattgagagagagttggaaaactccaccaagaaagaaaaaaaaaatcagaagcatttaaaataaataagcctaggactgtttttaaaactgagaagatttttttttgttgttgttcttattgtttttgaaattggactaatggtagagggaataaaaggatccagataaactaaattgctctaaatagctgtagttcagagcagtgctaaagaaataccttcaaagagtgcttagaaaatggggaagaaattagtctttcctgctgtgtgtgttggcagaggggtgaagtgggtgggggttaggaaggaaaataggaagacatttggtcctcccagcctagtctggctgtcactcctgttagtgccgacatgattctttgacacagagagttcagaatcatcacaggtcacagagaagatgccagtaagaattcatagcccttttggggcctaactgcagtgaacctggtaaataattcaggcagtcagaagtgcctgggtatggaagactttaactgagcgttttcatcttttcttttaatatcatctcaggcctttccagctaatttgattaaaacctacatttccccacaccccctcttcctattgtcaagaaagaccatttagggagcccagagttttgttttctctcagctacattgtgcttttgataacttggaaatataattggagattgggaacatcattaagccagtactggcagctctctcctgtgaatggtgctcaacacttttgcttgagttttgcctcaaaaagtcatagattttccagattttaaggctgatagaaccatgatatacatttgaaaacttatatagtgtacatgttacctaatatcagacataattgggacagttacttcagttaaattaagaaatcataaagatatttaataataacttgtggctgggcacggtggctcacgcctgtaatcccagcactttgggaggccgaggcggacagatcacaaggtcaggagatcgagaccatcctggctaacacggtgaaaccccgtctctactaaaaatacaaaaaattagctgggcgtggtggcgggcacctgtagtcccagctactcgggaggctgaagcaggagaatggcatgaactggagctcgcagtgagccaggatcacaccactgcactccatccagcctgggcaacagagcaagactccatctcaaaaataaaaataaataaataaaataaaataacttgtacacagaaacatcaaattggacattaattggccaatcttttgacgtacagctcagttttcatctatatatttccatagcaccgattgaattcatattattttctcccccaaatatgtcaaccctgacttccagtttgctttattatattgagatgaaagatttgtaagattctcttttccctacttccccctcccccgcatataccagcaactttagctagcattcatgattttttctgaaccattcaagtaagttttcacaccatgagtaactcctttttgtactcctaatattgcccaaccaaatatttctttatattatataattacagttaaaaggtataagtggcatcacatacttagggactcttggtgagcgcacagctcaatggttaagagtactgtgtggaggtattagaagaatattgtagcaaccgctaacactcagtatgtcatgggctggtgtattttgttgagggtgtgagaacacagtgttttctatgattaaatggaatattggtaggaaattttctgctacatatatcccacctacctgtaatcttgggaaagttacttaaacacttgacgtcccagtttctgcatccctaaaatggcaatgtaatatttactacacagtgtggccatcagaattaggtagcaaatctcaagcacgtggcttggtgcattacacgttacatgttacatgttagctgttactcttttttttttttttttttttttgagagggagtgctgctctgttgccagactggagtgcggtggtgcgatctcagctcacagcagcctccgactccctagttcaagcgattctcctgcctcagcctgccgagtagcttggattacaggcacgcaccaccacgcccagctaatttttgtatttttagtggagacagggtttcaccatgttggtcaggatggtctccatctcctgacctcgtcatctgcttgcctcagcctcccaaagtgctgggattacagcttgagccaccgcacccggccgttagctgttactcttatttccatgcttggtagtctatgatagtgtctctcaaacttcttgcattattacacccccttcccccacaccccctgccaccatccgaaggagattgcctagatttttttttttctaaagattgccttccctcatgacattttaatactacagatctactgtatatctatggatgtactgtagccacctggagggacacaaattctcataatagctaaggtttttttaaatctcttttccacaagaaccagtttttatcccgctggagaagacgccatatgctcattgggaatgcatgatctattgggttatagatgattgcgtttttgctcaacccaagccatcagagcaccatgttagaagagggttgactttctaatgggggattgagcaagttttgacccaagagtcatgctccctcctctcctggaagttttcctgccgagatggaagcttagatttgggagccaatggtgcagagggtacagtaagggattgatgcacatcagtgatttttagagtctgggaaagcaattagagttaggcgatatgacttttcttaataaccacttagcagcagttttcatttttgttaatggattgtcattgaagattcaaagtcattattcattgaacagaaaagtagggagtcagtggattcttgcaacagctaggggtgggatcacagcaccagggaaaagaaagttttcggctccaggaagaaatgtttttggggaggcctggaagctgagattgaattcagtgtgaatgtccagaagaaggacttgccttcagtttacaaacaagtttttgctttgcagtccttctatgagagttggttgtaagtgagctgtttcttaatcaccttgtgttgtaattagttgtggcatgcttgtcttatgtattatgcattttatgtgctttctactgtattaagaaatcaagcgtctctgtatgagtcagctcatactgcccgaacaaagtaccacagactgcacagactggatgacttgaacaacagaaatgtattttctcacaattctggtggctaggagttcaagctgtcggcagggctggtttcttcctaggcttttctcctcagattgtattaatagatagccatcttctcttctcttgggtcctcacatggtcttccctctgtgtatgtctgtttcctaatctcctcttcctgtacagacaccagtcatattggattaggccccaccttaattactttattttaactcgatgctccccttaaagactctgtctccaaatatagtcacattctgagatactgggggttaggacttcaacatatgagttttgggtgggaacagtttagtccattaacagtccactgcctctcatgtgtttgcttgataaatgatttttttttttttcttttttgagacagagtctcactctgttgcccaggctggagtgcagtggtgttatctcggctcactgcagcctccacctcccgggttcaagcaattcttctgcctcagccttccaagcagctgggattgcaagagcgagcctgccaccatgcctggctaaattttgtatttttagtagagactgggtttcgccattttgaccaggctggtcttgaactcctgacctctagtgatccacccgcctcggcttcccaaagtgctaggattacaggcatgagccaccttgcccagctgataaatgattattgaataagtgaatgaacagatgaatggatggatggatttttatttaattgtggtaaatctgttgaattagtaactctagcaatattcgtgagttaagtcataatgtttcttaaagtttttgtgtttcttccaccctgaagatatgcttaacagatgacattcttcagcaatgtttctatttattcaggaagtatgcacgacccttctcttcttggaggcaggtctgctcgtcatgtgaagagccactgccctcaacaggcccacgcaaacatttgccagcgtcctgagcaagaacatggggagaggcctgctttagatctaattgttcaaaagctacaaatctcattagcaagttgtttaaaaagtgtaggcactttgcctattgtgacccatctggcttccagaatatcctggaaggccaggcagatttgaccttagaattctcaaactctaccaaatacagaacagaaagtggcagtgcagggataactggtccaaagtctcttcctttcccactgaggttccgtcctgaaacccaagaggctttgcacacagacaccccagctctgcactcctccttcccaatccgaacaagcttagaagtgtcataacctcaggaggacagacccagtggagaggtcctccagggccctgtgagaaagttggagccaggaaattctggaatctgggcacccaagatggaacctagaaggagcaatacaggctttggatggtcatatccctttgaccctgtgcgttccttaccctgataggaggggtgttggttgtaggtctaaggttggtactgtggtcaatttcagctttttcaggaactctcactggttttgagattattcccatattctgaattccctgcagaatggtcaagagagttggggagatagaacatttggagaaaacactagagtcagagcgtagccacctgcaaaggtagttaatggaggtggctgtttcaccgggaatttgtttcatttagtcttgacctcttgaccctgaatacctagtttctgcacctgtgagtccccccaaaagacaaagtaactccgttaggagacttggttctagaaacatatgagcatatttcaggaagaaccagagcatgagtgggcacctgcacgccttaaatggggcctgccctctgcagtgagccatgagctgggggagcagccccgcacctctattctcaggtgagacagggtcacctctcgtgagtcacacagcccaggcagccttctagaaacgtgtcaaactctattgcactagtaacttttttattgctagggtcactaaaagccactttttcaaattatcggaggttgtttgccaggctgtgcacagaacttcagaagaaggaaaaaagccaatggttttcttcaccacacatagaataatttataggtagggaccaatttacttgctagggaacagtgggtggcctgtgccttccccagtggaagggacattatgctaagcagggtggcaggcttcagtgctcatgatagaagtcaagagacccttctaattaattacatggctgtctttacccagcatgggttcctcactttctcatcaaagaccttgtttagtcaaagctgtatttcttttatttatttattatttatacttcctctctttctaaagagaatttgagacaggtggaaaaaaaaaagtgtggggatgttcgcgagaagagactctctgaaatgggacatttgaagagagaattctgacagaagttcagagcatacttttcttctccaggctcttgttcttgataaaatttcctgttctacttcatcattacttctcaagaacttctttcagctctttattggctagatccaggtagcgtctttgatctttaccttctcaccataccttccctgcaggcttttcattgccgtgagaatagaatctaaatggattaccaaagccataaagatttgcctgtttaagtccattaaaactcttggccctatttctgcactttgccttctcatttctcataaaatttctgagacacaccagtctttcagttcctgccagagctaaggctctcccttccttgtatccttgtgcctgctcttgcctagacctggacttacttattggcctctcttctcctgagcaccatcattctgcaccctgaatcccccatccttagcaaatcctcattctttaggaatcccattttctaagttgccatctgtgactgccatatttaaatctacctgacacacaccattatcatcgtctatgacacttctttatttccttcatgacgttgcttacaattttatcttttctaatctcaagttttgtagttttaattaatgaattttttttgagacagagtgtcactttgttgcccaggctggagtgcagtggtgcaatctcggctcactgcatcttctgcctactgggttcaagtgaatctcctgcctcagcttccaaagtaactgggattacaggcacctggcaccacacccagctagtttttgtatttttagtagagacagggtttcaccatgttggccaggctggtctcgaactcctgacctcagatgatccacctgccttggcctcccaaattgctgggattacgggccttcttgctttctaaacatagcaccttcctgactgtagggactttatctgtcttgctcacctgtgcgtcacacgggcctcctgcttcatcagacacagtggccactcaacaattgcctgatgaataaatgcatgagaaatactagttttaaagaaaggtctgatacacttcacttggtttggaatgtttaccaaaaacctttgcttttctagagagggttgcgggctaatccaaaagaattggtttataattatgaaattttaaaaagcgtcagagaaccaacaaggaaagatttttgaggaaatggaggctcatcaggaaagcacaacatgtgaagttgttgcccactcacatgtctttttccttgacctgtttctagaatgtgttgtctcagacagctgacctgtcttggagatgtagtactttataagatgaaccaagtatgatcctcccaaggaccagggcctacagtccagtcaagcttgggagtgtagctaagggaggaatgaataacccactgtcatttcaagcgtaggattctctcatcactctcactgttttaaatcttctttatcatcacagattttacattattcccttatgtatgaatgttatttttattgaccattgaagattggaacttttttctggaaaaacatcacatggttgagtcaaggatgaaaagtcaaaactaccttttcatgtgaggggagagagagagagagcgcgcgtgcgcgaaagcgtgtgtgtgtgtgtgtgtgtgtgtgtgtgtgtgtgtgtgtgtgtgtattgggaccacctttcagctgtgttgcctccctctggtggccattatatgcacaaggcctgggtgacatggactgagtcagaatgtaacttacttttcaaaaaaaaaaaaaaaaaaaaaaagactaagtcattgtgtgcacctgagtttttaaaattattattggtgggaactctttaaaaaaagaaaaaaaaaaacacagttaagtggttgaaattgattagcactacaaaaatatgagctttttgcctttggggtagagtttgaaagctgccatggccttcaatgaaagcagcattctggttgtgtataaacctgtaaaaggatctgcctgtatgtttaaattcttctgtgtttggagaacacatctcagaattcattcacataatcaaggccaccactatagattattttaaaggtagcttttaaaacctgttgtgtattttcaatattctccttcaaattattccttaagagtattgtgcaaccacagtggatatgatattgaggcagcttatctgggttttatttaaagctttagaatgactcgatttgatcttaacccatttctagtcatgttcttggggtgggttggggggaaatgtccttgaaagaaggagagggtcaaggataataagcaatactaattttcttctgtttcttatcccctcttgttcctcaaatccagaaatagtctcctgaacatagcctgacacctcagcatgacaggtgttctgaagatgagaaggcacattgtaaaaacctatttattcagtgaggaaattttataccatttacattcagagccatctctatgataccaaaataggcttaagcaatgaatttttcattttttagactcaaaaccagataactcacctggaaatacacactatgtaatttcatttcatgggcctaatcaatatcttcgaccgaaatgtgtattcctcttgtgaaggagacataagattttctgttttgttatgtatattacatatgtgcaatattagggtagggaagtaggccttgtttatatttttggattgagtttatttttttcataagcttttttatagctctcaaagatattggcctattttacgttgattctaactgtgtggaatggtaaagtagtatgcaattaaagttcggttgaactgtcacattgaatttatataaatatttaaaatatattgttattatataagtaaaaattcatattttttgtgatagatcacgaatacttagttgatttcaggtcacagccatcatagaactgaactgttaggtacatacatgcctctgaacaaaccaagtatgttatgtttctgagtgaccctatttctgcagtactataagtcaataagagcatggaatttgatgttatttggttaaaacaaatatagtgctgtagtaattgcaactatttcctagttgcatgttctatgccttttacaaaggtcatctagtttctttatgcccagggactattcatccatcgctctatctatccctcaatctttccagatagctttaggtagcttaaaactcttgaaagctattctgaaatattatctcactgattccttatgggacctcagattgaagatgtcaaagagtttttgcagactaccttttcaaacaaagtaatcatctgaaggtcgttctttgactcgttcatttgtgttacaaacagatcttgaatgcctgccacgtatggctgtaggctctggggaaataacggtgagcgaaagcagaccagcctgtctgcctagagcttacagagaagcaggacagaggttaggagcaggccctgcagcccattcctgagttcaagtcctagccctgtcacttactcactgatcaacttcataaatgtctgcacttattttcaggattgatggaaggaagatgtatatgtatattaccaaaggaaagaactatgatcaatgaatgaacaaggaaagtaaaagttgatggattcagtacaaccaactctctaccaaattagggacaaatgctccccggcacaggagcttttgttgttgtttaaagctaatcttaggaatgaccaacataaagagtgtgtgttttccacatgttaggcaatgttctaagtgatttacagccctctaacaaccgtgaaatattaatactattattttctccattttatatgaattaactgggacatagagaagtgacgcagtgtgcccaagttaacacaactgggaagtggaaaagctgttcaggtcctctgtctccagagcccagctcttgctcataacaccttttctacctctcttaaaccagtttattgagtgcctaattggtcctcttagttactttatatgatttatatctaatcctcccaacaatttcctaagcacagctgattatcccctttgaaattaaaaaaaaaaggtaaaattcagagaggttaagtcaggtgccctttgtcatgctgttagggaatggaagtgctgagataagaaactaaattctgactgactccaaaccctcaactatttccacaacatcagatcagacccggaagagagaaggaccagttgtttcaattccctgaaagcaattcctgatagggagcggctgggtggtcaaacgttagtgactaatcatcagccccacttgggaaagttgacaaattgcacctgacccacctcctttgcagacctatgaaaccacaatctgcaggggtggggcccagaaaccttcatttctcatcactttcccctagtgtttttaatgaccctcaggtttggggaaccactgtaccaagtgatgagggggaaatatttttcccaaaggttactgtctaaaaaatcagttattttctctgaaacataagatggttggtatctgtttgagcaaatgaatgaatgttatgaatgaactgaattatattcctttgaaatggattgaaagtacatagacattcactgtagaagatacatctgttatggaccatatacttttatatcttattagtactctctcaatttatttgcctcctgaaattctgctctaccagcttccttttactaccggggaccaactacccaaccagttgctatcaggaatagctttcagagcatcaagacagttggctattcttctagatccaaacaccgtgcaggcagtagttgacgtggaaagaggccacccagtcctgcagttccagattttaaagggagccagggatgatcagtgggatctccctcccagtgggctgagagaggcaggtagcagtagtgaaagtgtcttcaatttcatccatttgaatttataacactggttatttgttctcaagttacccccattactccaaccaattggaaaccatgtgagaacaacgcttcaaatgtattagaatattttgtgtttgccaagagcatagcttttcctttttggtctgattttaatgttttcaattttagactgactggagcctggaaatggccaactgtttaaacaaagtgtttcttttcttttcttccctcctcccctccctctctccttctttctcctttcccttgtttctttctctttatctcagtaaagagaaatatctgcctaatgatcaacttccgggggcttggttgaagtttagtgaatgagatagaaaaatggtttcaggctacggggtggctattgatatatgtttccctaaattcctttgctaatccccacaccttggtcagctaactataggactctcctgattattgtgcaaacagtagagaattcctcttcagtatagctttctcattgtatcacttcatgcactgtgctgccttgtcacaattcagccagtgctgaaaccattaagattttattaggtttgtccttgtcattctattacgcgattggcaatgcttattgacaattcttattttctgtactatgatttttatagttttagtttattaagtgctcctggaatacaggctcctggaattaattagaaaaagaaaaaaccttcttaggcagcactaggagagaaacactgagcagaaagctatagcatgactttcgtgctttgagtctcagttcctatgaaaagagttaaattacaataaagtagcctggaatagctgctggtttttactgtcatctttaagagactggcaaggacgggttcttgctgcccccaaagagcattttttttgcatgttgatttatactcaggcttttgaagctatggtctcctttaaatgagaatttctgtttttacctagcacctgccattaagccattctttataatttctagtttcctggagaggaagcaacatattcaatacagtattcacacaaacagggaaatatttaaaagacaaaaaaaaaaaaaacccttttccttttgatatttgaaattcatcttgtaaagcaactatttttatcaccaacatttagacttataggtgacatgcccaatgattttgaaacatgagttcgtttaatatcttctagaagcacgactacctcagtgagaagcggacagagagttgggagaaagtattgtgcagttaacatttttttccttctctcagttgagctgggattcatctctggcttcacattacaagcagcttggatctgtgtgcagaacttacatttcttccctggcttgggcctctctatccttccgattttcacagagccatcctttgcctgcagtgtttttcctgatacctcatgggctagggtagaactctttccacaggaccatgattacctgatgctctagggttaagaactctttacatagaaccctaattccctgcctactcatttttctcccctcacttaacttttaagcctcatgagccaaaaactacatcagctctgcatacagctgtatcctcgttctagtgctcaataagtattggttcaataaatgaatggaaagtatattacattttcatgctttttgatgtccatgggagaagtatttttaggttatgtttattagaaatttatcttaattttctctagaaaattgtggcaataaagccaactttctaaagcacttgtaagaaggtgtgtgtagatcatcggttctcaacagttggcgattttcccactccaggggacatatatatggcaacatctggagacatttttggatgtacaccacagccccaaagcacagaattatctggcacaaaatgtcagtagtgcttaggctgagaaactggggtagttggaagtgcataaagcttggcaggtcaaagctgattttattttgttctacacagtggaattcagctctttggatatcattaataataacaattacatagagaacaatcagcattattatgttcttgccatgtacagacataagcttttcacaagtattattttgtttaaccctgtcaactgtgctgtgagttaggaactattattatcatttttcagataaggagactaagacttgaaaagagaaatgtgtactcaagatcctgctgctacttggtgatagaagtaggatgagaactcaggatctatgcttggtgaccattatacattctttctctgtaaatatggtccccaacttaaagtctaaaaggatcgctgccttcattattcagtaggaaccacagctggaaatgcaaagaaaatttaaatttaaaaatttaaatgtagaaaatcattatggcttaggtggttgtaattttaccaatatgtatactgattgaaacaaaaatagagtgcattcactgataggtgtaagctgctgttgatacacggaacagaacaaatctgctacatgctgttattttgtgggattcccaagaaggtcaaagaaagccctgagagtttgttttcattcaaaattgaacttgtcatagccgatcaacacattgtggtctagatgggacttttctcctattaaggtatatgaacagtgacagtttgccccatgtaatcttattaggagctttcttcagaaccacatcatcttcttatataattacaaaagagccactcatgagtaaaatatgcctgcaagagagcaaggcctgggggcaaagggttggctgatgggggcctgttctctccttgcagaggacacagttcaggaaatggaaaatttacgatctggatgcataataatagtttctaggcccatccctgagtacttggtttgctcccagtgttaatgtccttgaggctgttagttgatgaactctaagcaaacaccatcatcctcaagtattgatttgtttcttagcccctaatacttggcctataagacaatgtagaagtatctattctttttacatatgaacttagagaccctggtgctgctgtttttctctcctaggacattcttttcagtggttgcttctatcacactttgaagatgccagtagaatacttaaaaacattacattttattctttagtctcactttcctatctcttgtggaagtaattattaatagcaccaaactgttttttattcttaaatgttttacaaaagtgggctccggtgatgacaagtaactctttaatgtcctactaggcattagtacttgtcatctagataaacattttctgttaaggccaagtgtcgtacatagtcattgcactgctccacccagaagatgtaatttacatataagatgttatttgagactgtctcccggggacaaaagtgattagtatgccttatctcttctcaaaagagtcatgtaacatgctcttgcatctattttacatttaataaattaaaacatgaatgattaaataagatgttcatagtgcttcacaaatttgaatgcgcccatcccaggctctcgctaacattctgggcctgaggtttagcttttctaccatcttgccaggttaggctcatgctgctggaccaaggaccacacttgagtaccaagatgttagggaacattaagatggtttgaaacctgagctaaggatgccatcaggctgatagcattaaactcatttttcctatgccacctcagttatataaattattctttaagtttatagagaggtttcttttggaaggaatggcatccttttcagcagcaaaatgtatattaggttttgtaaaaaattaaataatgcttgactttttttttttttttttctttttgaggcaggttcttgctctgtcacccaggctggactgcaacagcatgatcttggctcacctccgcctcccaggctctggcaatcctcccacctcagccttcagagtggcagagactacaggctcataccaccgcacctggctaatttttctaatttttaatagaaatggggtttcactatattgcccaagctggtctcgaactcctgggctcaagctatatgcctgcctcagcctcccaaagtgctgagattacaggtgtaagccaccacatgaaatcaagcccggccatgcttgatttttaataaagcatcgtatctctctattttacctgaaaaaagatcccctcccacccaccttatatttccgaaacaataaaaaatgagttttaccttttctggtcatcgaaggcattttttgagatggcttaacaatcttttaaattatagaacacatttacaacatccttgacacttaaataacatttccagtgttctttttttcttttttaattatatttctaaagatagctaagagaacaatttcaaatagttcctctatgcttttagatgtaagttgtttcaatctccatgtattggtgagaattaagagacttgcagttcgccatgtcctgtcatgttagcttattttgtagggaaatcaaatctggcacctttcaattaacttctttacctctctaatctaaaaacagatagaatacattctggagcaagaaggcatgattactatctgtggattgccttgacttcctcaactgtgtcttctgtcatttcgaaatttgctaaaagacctcctataaaagcaggaaagcacagacggaaggaaggtggtgctgttgaaaaataatttacccctagtcgtgagcttggcaactcttcaagggatcacaatggtgtatctcatctggacctagaggtctcgaaggaggagataagtggaaatgttttgtgggctggagcttagtcattctcctcggtgacttgaggtgcaagctattttggaggaagataaagaggaagggagacaagaagtgggaaagaaaaaagtctctctgccttcatacatgcttctgttcactacgtttatactacttttttttctttgaaaaattttttctttgaatttcttttttttctttgaatgattgttttaaatcatgtggtaatgtggtcatgacatatgttaggtaacaaaaagaaaaataatgattccaattttgttaagtatatgtatagaaaaaaggaaagtaagcaaatcgatcagttatctttgagtgataatataatgaataatctttatcaccttcatactgtgttctttatattttattctctaaaattttccattaagcatgaataaggttttgtatcagagttttaaaatacattttaaaaggaaatggcaacttattcagctacagcttttttataacatagtatatgaaagttcatatctagtaaatgtatttggaaatataatacatttggaataacttttctgtaaggatgcatctttttaagtgactttattagtctccatgttgcatttttaaatatataactctgcagggcttcacattttccccttcacttttgctagctgtcagtcatcacctctaccttgaaactagtctatgaccagtaggatttgtagataattatcattaactgattgagtggattcagcagtgtgcctgttgtaattaagtgtttggatatgcaaatagataaagaatagataaaagagaaggtactgattaggatgttaaattcacaatatgatggttgatagtgacaggtaatagcatgatgtccttttgaagatactatattaattatttcttgaataccttttcaagtaagttactgttatttgaaattccacttaatgccagccctggcccctcaacatttcatcccaatctcgttgtttttgaaaggctcagagtcatattgggcacttctttcattactgcctttaactgaccatttcctcttttctttcctgcaacagattgcagattgagcttaaccaagaagttcgtaggctaatcaaggctggcttgacctacaaaagaagaagagagttctgcctgcccacttgggcttgtgttgacacggctgataacttgccatcacctgttgccagtgtggaaaaattctccctgttgaattttttgcacatggaggacagcagcaaagagggcaacacaggctgataagaccagagacagcagggagattattttaccatacgccctcaggacgttccctctagctggagttctggacttcaacagaaccccatccagtcattttgattttgctgtttattttttttttctttttctttttcccaccacattgtattttatttccgtacttcagaaatgggcctacagaccacaaagtggcccagccatggggcttttttcctgaagtcttggcttatcatttccctggggctctactcacaggtgtccaaactcctggcctgccctagtgtgtgccgctgcgacaggaactttgtctactgtaatgagcgaagcttgacctcagtgcctcttgggatcccggagggcgtaactgtactctacctccacaacaaccaaattaataatgctggatttcctgcagaactgcacaatgtacagtcggtgcacacggtctacctgtatggcaaccaactggacgaattccccatgaaccttcccaagaatgtcagagttctccatttgcaggaaaacaatattcagaccatttcacgggctgctcttgcccagctcttgaagcttgaagagctgcacctggatgacaactccatatccacagtgggggtggaagacggggccttccgggaggctattagcctcaaattgttgtttttgtctaagaatcacctgagcagtgtgcctgttgggcttcctgtggacttgcaagagctgagagtggatgaaaatcgaattgctgtcatatccgacatggccttccagaatctcacgagcttggagcgtcttattgtggacgggaacctcctgaccaacaagggtatcgccgagggcaccttcagccatctcaccaagctcaaggaattttcaattgtacgtaattcgctgtcccaccctcctcccgatctcccaggtacgcatctgatcaggctctatttgcaggacaaccagataaaccacattcctttgacagccttctcaaatctgcgtaagctggaacggctggatatatccaacaaccaactgcggatgctgactcaaggggtttttgataatctctccaacctgaagcagctcactgctcggaataacccttggttttgtgactgcagtattaaatgggtcacagaatggctcaaatatatcccttcatctctcaacgtgcggggtttcatgtgccaaggtcctgaacaagtccgggggatggccgtcagggaattaaatatgaatcttttgtcctgtcccaccacgacccccggcctgcctctcttcaccccagccccaagtacagcttctccgaccactcagcctcccaccctctctattccaaaccctagcagaagctacacgcctccaactcctaccacatcgaaacttcccacgattcctgactgggatggcagagaaagagtgaccccacctatttctgaacggatccagctctctatccattttgtgaatgatacttccattcaagtcagctggctctctctcttcaccgtgatggcatacaaactcacatgggtgaaaatgggccacagtttagtagggggcatcgttcaggagcgcatagtcagcggtgagaagcaacacctgagcctggttaacttagagccccgatccacctatcggatttgtttagtgccactggatgcttttaactaccgcgcggtagaagacaccatttgttcagaggccaccacccatgcctcctatctgaacaacggcagcaacacagcgtccagccatgagcagacgacgtcccacagcatgggctccccctttctgctggcgggcttgatcgggggcgcggtgatatttgtgctggtggtcttgctcagcgtcttttgctggcatatgcacaaaaaggggcgctacacctcccagaagtggaaatacaaccggggccggcggaaagatgattattgcgaggcaggcaccaagaaggacaactccatcctggagatgacagaaaccagttttcagatcgtctccttaaataacgatcaactccttaaaggagatttcagactgcagcccatttacaccccaaatgggggcattaattacacagactgccatatccccaacaacatgcgatactgcaacagcagcgtgccagacctggagcactgccatacgtgacagccagaggcccagcgttatcaaggcggacaattagactcttgagaacacactcgtgtgtgcacataaagacacgcagattacatttgataaatgttacacagatgcatttgtgcatttgaatactctgtaatttatacggtgtactatataatgggatttaaaaaaagtgctatcttttctatttcaagttaattacaaacagttttgtaactctttgctttttaaatcttaaaaaaaaaaaagttgctgaagtactgtacagggttgtacaatgagaacccaatgccaaggcaaaaagaacgagtgatttttccttaggatacacatcaaccactttgctgttgaagctgtcagaataaattcctggtggtcagatgaaagggcagattaaatggactcatcagggtaagaggaataatatgggtaaaacaagaaatggcccgatagtttcacactattcctatacctccaggtccggaagacaggtaaaaaattctataatgtaagaatggaggtagttaccctgatttgaccctgtgtgggaaatgctgaaagcaccaggaggaagccggttcccgtgagataagttaacccggcctgacagaatcaagaaaattgagatgagatttgaaaggacccgaaaatgcaggggttggctttctgactgggaacttaaaaatcactcttcatgcttccctggtcctatgtgataacagagttagagacttgagtctgatttcagtcatcttcagggaccagtctgatgttgtagcaagaagactccctttaaaagtgttactgttcaaatcatatatcaggttgaatcacattcaacagagatatattctagaatacttttttagaagaggctaataaagggaagaattatattgaatggaattatttttgataatgagaattatttgggtagattcactgaggctatgtcaacatgatatttagaccaacaggtgatcaatgtttggaaaatacaacaatgacttatttaaaaattacccttcctgctatttagacaaaaacaactgatcagtggttctgttatgtcagctgactttgttagtatcatgttgaaatagcttgaagtaatatcttttatccccttgcaaattcttgtcttccaatcatctcccatatattttcataattagttgtttatgacacctttgtttttctccctctgttcagtatttcaaggaaaattatggatgccagtcttggctgcacaagatatccattacgtacttatacattttaaaatgagtactaattttcactgctaataattctgtaaggacacatcaaagctggccaaaataatgaattttttttaaaaagcaatacctggtttccaccttggactgactttgatcctgttccacttttgaaattttatttgttccttttccatcgtggatgttcctctactttggcaattgtggagggctaatcaatcttatgttagcaggacaacccatgaaaaacaagtcagagagtgaaggctttttcccctaatcctggcagagcagggcgtagaaaagagaggatgtccgtgcttaattctagatacttttgagacaacaccttcagaaaacacataatttaatctttgccatccttagatagagaagggctatagatcacatacgttatcaaaaactactcccttggaaaaaatatctttcgaaaatcaaatttaaacatttcactctgtgctgcatatttcttttaccattgaccattattatagggacccatgaagtaaatgtcacaatcatcttactagctctctctctctcagcaaaataaaactgtgatgtgtcttctttgtaaaagtttaggtataaaatgctatgcaactttttctttatagtaagagctttattttctttaataatatagcccaacttatatgttttaatctcccttgtccctcagaataagcagaaaatataactgcagctgtatgtcgtagacacaagaattgaaactgtgcagtcagtagagctgaacttagctatgaattaatttaaattaattctaaagtgactctggtttccattttagtctattagctagagggttttggctgttgctttttttaaagttaggtccacacagtgaagggaaaagagtctgtgaaggtgatcagtgtagcagtaagacatctaaaatcaagacaatgacatgggggctttgtgtacttagctggataattcccttctactgtcctcttccccttggctgtgtagataaaattgtgcattcaaatgatggtactttgacttttgagggtttttatttctgttattcacaaaatactcattctcatttatgtatattgtatgtttaacccccagtgggatttctggctgctgaaaccactttgggccaggaagaacaaggatgaagaggttcctgtcatttcttatggggttcacagaattatttggggcttaaatggtacaatggagacagtcatgtgcaatgcttaagatggtctgacagggtcccttttgctggaggtgttcctgaagagattgaacctagtaacaggctttattttcaccttgtgtacaacatggcaaagactgctaagattaaaatccgtctcccatttgttacagcctcacctgcaccaggatagaaagcacgtgatggaatctgtgatgtctaatgtgtcttatgaaaattgccaaacaactgtccctggggattctgctttgattggcatttttagtcatgggaatgtatatttgctgatatatctgctctgtgtttgggcctctcttgctgtcattatgatgtattttgagatgattagtcaagagtcaaggttgcgagtacaggccaagaccatgggaaaaaaagccatgctcactggccaataaagagcttgatgctgcctggccaaatgaggtgactcagatagaatctgatcccattcagagcttggtaaatgtcactgtacagaagacattgaaaaggaagaggcatagtcatgatcaaaaggatatattgacagttatctatagccagggtagttgttaatacctgcttgtttggggagatatgtttgattatagagagactctgggccaccctcaaacaccgtcagatgcattagcagcccactgcatgggacaatcgcaggcagatacgaggaatgtatcccctgcctattttccttgtgtaacaaatggaaaacattctcccctgtgagaaataatgcaatttctaattatctggatgttcgttgaaaatatattagacattctccctgaggttaaaaacaaaaagtacgtgaccagtctggtaagaagtattaatgaagtagctaatattacagcttcattttctactagcacctatcataatggtcttagtcatttcacacaaatcagaacttccttccccaccagggaggacaacatcttcatgctgtgattgaagcatccattcagaacacgaggcaatattgcagtccacagggaatggatgcttcacttgatctccggaccttggctgcagaggccatcgcagcttttgaaaagtgaaggggttaattcccattggtgtctttgcttatagcatttttctctaacctataacaaggagacattacattttactttagaacatgagaatagcagttttgctcatgacttaccattccagctgcatgggaaagcaaagcagaaaacagtgccccaaatggaaaaaagatactcacacagaacaaaacagttcttggtcttgttcttggtcttgtcaaaccttgcctgatgctctttctaaagtcaaaatatgaatgctaagaaggcataacctacatccttctctgatttcttcagcagggtcaaaagacagttactagcaatggggaatgcttgtcactgtggagaaagagttttgtatatgtctgataccgttgttataacaaaacaaatttttttactatagttttttgttttctacctgcacacccaccagaagagcacaaagcaaggccattgcaacaggcatttaaaaattattatcaaacatgcacatgcttgtacacacacacacacacacacacaaacaggggcatttgtaaaggtgtccctggaatgtaagatttataatgtttaaggcaaggtgaaggcattgccaagtgtgtgtcgctcataggactagtgtatattcactgaaagttaacctgatgatttgttattgtttgaaccatatgctgatttgcttctggtttctgtttagtgtgttctctctgataaggggctgaaagattctgcatcacacatcctctgagacctaccatgtcgcacactttgttaatgacaaacttcactctacactatacagtaccttgttgatatattcagtaaagtcttattttaaaagaaaaccacattgtgtttatctgagtaagttcattgggatacagtcaatacttgtgctgttaatgtagaagaaatgacgcaggagggcaggaataaaagaggtaataggactttcgtattctcctatcatgaatatgacttgcatttctaaaggccatttgatcctttttgtgtgaggagtttatatgaaatcctcatgttcttttaaatttcccaactaaattgtgtgttcctacgaataccttttaggtatgcacacatacacagagcatcttattttatactggtgaaatctatgttgtttaggatacagataatgtcattgtatttatcctatcagaataggcttttcccctatttcaaaatagatgctattggctttattttttatttttaaattttttttaaacacggtcttaccatgttgcccaggctggtctcaaactcctagatgcaagcaatcatcccacctcgatcacccaaagtgctgggagtacaggcagaggacaccatgcccagccacgctattggttttaaatgtcagatttctttaagaattctcatagtacttttctgccgcagaatttatagcacatctgtccatcctttcaataggcactcaaggaaatgtatctattcatatgctcaacttcaattgattagtctcatatgatttttcagaaccccttttgctaacccctcttggccatttcattaataatgtatttgacagagattgaatcaggaaataaattcatgacatttcagttaa

SEQ ID NO: 112 - DNA, 26149 bp, Homo sapiens
gggataatggtggaaggaacatgcaaagagggtgtgtcttaattagcactggctttagggaacaaggaaaagggagaacccgggagtacgggaaggaggctggggcagacaggagtcagaggcccattccagcccaaacgagaagccagtgagcaaggtggagaccagggatgctgtgaccaaagcagagaggaatgggcggggtggtgctgacaccccagccccgttctgcctgccagagccccacttaccaggcccgagtccccagaggtcccctcctactccctgctcgattcccttcctcagaggcaggtctgtggcttggctgggaactccagggactgagggagcactgcagctgtgggaccggcgcatagctaaaagccggcgggccatagggccccgcggaggaggccccagcaggcggaccaggaggccgaagcctcccgacgctcccagcctgttgcttattcattcagagtgggaaagcgccagccgagcggccagccagtgcggggctggccatgtaaggcccacaggcggtcctgcccgcccggtgccctgcggagagcctcgtgcagccctgggcaccgcccctgccctgccctgaccccttggccttgaaatgctgtcatcggaggagccgtcccgctcgggacaaggccagcatggacaaagctagagctggggcaagcaaggagccttcctgtcctcgaggccgtgggaagagaagcacgcccagggggccactcctgagagcctctctgtccaccaggcctctgcagaggggtcaccatggctctggcccgaggcagccggcagctgggggccctggtgtggggcgcctgcctgtgcgtgctggtgcacgggcagcaggcgcagcccgggcagggctcggaccccgcccgctggcggcagctgatccagtgggagaacaacgggcaggtgtacagcttgctcaactcgggctcagagtacgtgccggccggacctcagcgctccgagagtagctcccgggtgctgctggccggcgcgccccaggcccagcagcggcgcagccacgggagcccccggcgtcggcaggcgccgtccctgcccctgccggggcgcgtgggctcggacaccgtgcgcggccaggcgcggcacccattcggctttggccaggtgcccgacaactggcgcgaggtggccgtcggggacagcacgggcatggcccgggcccgcacctccgtctcccagcaacggcacgggggctccgcctcctcggtctcggcttcggccttcgccagcacctaccgccagcagccctcctacccgcagcagttcccctacccgcaggcgcccttcgtcagccagtacgagaactacgaccccgcgtcgcggacctacgaccagggtttcgtgtactaccggcccgcgggcggcggcgtgggcgcgggggcggcggccgtggcctcggcgggggtcatctacccctaccagccccgggcgcgctacgaggagtacggcggcggcgaagagctgcccgagtacccgcctcagggcttctacccggcccccgagaggccctacgtgccgccgccgccgccgccccccgacggcctggaccgccgctactcgcacagtctgtacagcgagggcacccccggcttcgagcaggcctaccctgaccccggtcccgaggcggcgcaggcccatggcggagacccacgcctgggctggtacccgccctacgccaacccgccgcccgaggcgtacgggccgccgcgcgcgctggagccgccctacctgccggtgcgcagctccgacacgcccccgccgggtggggagcggaacggcgcgcagcagggccgcctcagcgtgggcagcgtgtaccggcccaaccagaacggccgcggtgagtacggccccggcgcccctccggccgcgcgtacccctggccactggaaactgctccgggccccccgggcccctccttagaacttcctggaggcctccccggagctgctaagcacggagcagcgccccctcccgacttcccccgacccagccaacagcacccccctggcatctcacctcccagcttaacccgcacccaggcatcatcagtgccaggggttggccaggcaggtgtgggctctgatcctggctttggtggagggactagccgagctttgggaggaggctcgccttctgcacttggcttgggtcatctgaggacaaaaggaaggagcccctcatccaccttctccctcatttcaatgagggcatctccttccccccttagagatgttctatgccagctcacagggtgaggcaaggagcatcagaaacctgagtcttcagggccagaaaggccttaagggatgcccctggaggtgtggcaggctgcccattactgggcatgtgtgaggttggcttgagtgcgcaggaggttagaggggagcgtgtgctccaggcaggagtccggacttcctcaggggagtctgcaaggctggggcaagagagaccagtcaggcactggcctgggtgcagaatttcaggggctaccaaaaaacacagtagttgagatgagtaatattgagatgtatttttttaagtcaaaattaatgcaaaaaaaaaaaaaaaaaaaaaaaacctgtgataaaggaaatatccagattttaaatagagtcagtaatagtggtatgccgagccatattggagcctgaggctaactgaaaaatcagcaacacggatcctgtctttatttgatatttggatattttgttcattacagatagttttgcattaatttttattttaaaaactattgtgttaaatattacttatctccgttactgagtttttttggcaccccctaaaattttgcaccccgaggaaaaaaaaaaaaaaacacctcactggcctcattcccctcaccctagtcctggccctggcggagagccccagctgtggacaggactccctctggcttttcagggggtgaacatacgtcctcctcttgggaaggcccaagccctctgcacatgaggacacagtggaaaggcagcttccacacatgctgttagcagacagggctactgtgacaagggctgactggtgggtgtggccagtgctggacggccatcagccattctctgctgtcctagaatccccctccctgctaccctctccatacaggcagcttttgggccaaggttttctactcagtccccaatacttatgcagtccaactctgccttgcctctttcaagctgtcgtcagtttcctctacccataattctctgctccccattgaggttgctgtgcctggcccaccaagtaagggctgactgagccctccagtgcctcagagtataggtgctagtgccccagcctcctcctcagcctctgtcagcagagggatgatgctttgtctccagccaagctgacctcagtgaggggctgctgctcatggggtgcctgtctccctgggtactgctggaggccaagactaggggagaggagcgtctccactgggaacactcactctatcacatccaaggtgtcgcttttgagttgtgtgctgaatcccactttaagaacctgcaggagctcaggaaaaatcagatggcaggtccttctgtggtgtgatgaaggatgcatccacctgctctggtccttaccaggtacttgcagcatccctgcagaagggcgcattatagccatgcatcagctgctctagggccccttggagaataggatgttttacctagagggtgctaaacttttgcagtggcttttcttagaatgcaagacctcagcatgaggctcagcctgatgggccccacctctgggcagagaaaactgagctctcaaatgccacaatattggcagaggcatgcctgggacttggcatctgggcaccaagtcagtgggtcttctagggcctgtctttgggctgttagttcttaaggaagccagttgattgagaggggaatgggacagggcaaggccatgtctgaagtgggggtgcttggtgcttagcagacctctggccactaccctgagccccacagttcattttgggtcaaaaacatttctcccctgaaggtagcatcctaggtgccaagctgagtgtactcacatgcatcaagtccaggcccttccctggggcagtctaccaggaggggcatctcagtgctgtgattaggcaagcattggtggggccaggggctttgtgagcccagaggagggccctccctgtcaggggctagggctcagggagacttccacaggaagcaatgtctaagcattgctgcaagggatggtcatcagcaccatccaggtgccccttcccctaatcattgagggtgtggggtgggagtgtgttttttgctggggaggggattgcaggctagtttagggctcacaaagaggccagagagggagcagtagtctctcccatcattggttcctccctccccaccctgctaggccagaccgtggaaaatcccagcccagggaaggccaagccttgtgcttgagatcagacccccaggcctggtgtgggagcccaaggcggattctccgagactgacttcattcctcctggccacacacccaggggtctgaggctgggcgctggcagcctgtgagtgtgtgtgggcgtggacgtgtcctcacaacaccaagcacatgtgagcaccacccacctccctccatgggtgggtggtttccaagcgcctgtcctgagcccagtttcttcctcgggtacctgtgccctcttccttcctaccctgggcactgagactgcccaaggcttcctgcagtaccattctctccaactctgaaacatgaaactgaaaagaaactagaggaaacagaggcccagagagggtcacatactttgcctggctctcatagcaaatccttgaagagaggcctggagggtggccagccacttcccaggcccagctgggtctcctgcactgtgtcggctccctcgatgtgaccactcctgctattaccaaccaggccctcctctcctgggatcctcgcctcagctcctgcctccctggagtttcagcttgtctgagctgggggtcttagtgccacctaagaagccccacagccccagaagaccaaagctcccctcccaaggccttaccctcgcaccccccgcctgactcaccggctctggcaatcctgtgaaaggaacatggaacaggcagccctgggcatcctcccagggcatcttggatggctgtgctagccttgcctgacgtgtgtcctctatccctgacttcacatggccaatcagaggccaggagagaaccgcagctgcctcctccctggtcccttgctcccagtctctccctcttcagtctgtcctgcatgtggggcagataaacccctgcagtctgaccaggttactcctctgctcaagaagattctgtagctcctcagggcctttaggacaaaatctagtgtctcagcccagcactccagagttagaggcacctccttcctgtcctttcttcctccttttctcaagcctccacagcccccatgggaccatgctgctcgtgggcctagatgttacacctccctagacacatgcaagggtgtttctagggtacctccttctctgtccagcctcctgcacccaagaggccagacctgtctggaccctcagtccctgagagcagccctggctgcctgctaccacctctcctgcctgagcccctagctcacctgggcctgctccaccccacctccacaggctgcctgcccacctctgccctccaggtcactcgccttcccctgcagagtttggagtagatgcagggaaggaccaaagcaggcttcacccaacaagcttccagagttagagcccagaggcagggataataataccaacttggccatttgctgaagaccacttcctgggcttactgacttcaatgtgcagtttcattcatcctcacaacctcctaatgaggtgcagattatggtcctcctggtgtagatgagaaaacaggcctagggaggtggcacagaagggtacagccgagcttgaattcaaactgaacctgtgctctctgcatcacagtgagatgacccaggaggatatcatgttcagcctgcgggcagggtggggcagggcatgagcatggacccctctgccagctttgcctctgtggtcctcacctcccacatctgcatccagaggaagaattatgcttgcatttgctgagtgcgttatacatcatctcctttaattcccaggtcctagccaggtactgttatttgtcccgtgttacagatgtggtgacgagctcacttgctgacttttagtagtggaaccaggatttgagtctgtgtgactctctatcctgagttcttaacaaccatgcatttaaaaaaaaaatttatatattattgcttatcttgtacacctcatttattcactcattcatttggtcattcattcattcaacagatatttgagtgctagattctgggcactggttgtgacagggtgagatgggacagtgagtgtgaaagactttggaagcagagtctctccccagtgtggggttagggtgtagcctggtcatggtcattgcagattccagaacgtttgtgtaacaaacactcatatggtgcatactaagtgccggacactgttcttggagttttgcagttagaatcacttaatccctgtgacaaccctgggattgttatccccattttgcagatgaggaaactgtggccctgagaagttaagcgacttgccctggaggcagaatcacagatcagcatccctccttccttccccgaagttgtctcagattgttccttcagaaagaaaaagagtcttcaggcttagaaagctgtgtcggatcagacaagctgtggaaacggagggttctgggccctcctcctgcctccctgtttctcctttgagagtcatcagtgtctgaacaaacaagtggagtcctaagcagcctcattccaggcagacttcctgtctcctctcttatcagccacttgcaaggcaccttctctctcccctgctctcaaactggaccatccctgcaagaagagacagctcctgttttcaataataagaataagaatatctgatatttattgaacatacactatgctaagcattttatttttctcatttaattcccacaacagccttgtgagataaatagtattatcagctctattttatagatgaggaaactgaggctcggagaaattaaccaactcacccaaggtctcagggttaatgagtggccaagcttagacctaggctgactgtccaatccagtgggccctggcctcactctgttccgtctcttagggacgggtgttttatattctgtgtcacctgtctctgtgttcactgttcccctgaggtgtaaacacctgaaaaaaaccaaatttgggtttttgcctcaagtttgcgggccccacagagttgctggggatggtggcagagcagggttgggagccattagtaccattatgggcaccaggttactgctagacttggcctgggagctctggctttttgtcctctctccttcctcctaacctcaggggtcctcactgcagcatcctctgctctcagaaggtgtacccctctccagtagctccctagtagctcctgagtccattctacctcctttctaagctgggaacacatggaagacttcccaggacagtggctgacatgggcaggagaggaaaggggcagggagggagctggggtccgcccaggcggcccacacctccttccaattgctgtgcccagcattcctgcagaagagcagtcagggttgggatgctggaaagagaggtttagacttgcccctcccctggccctgacctagccgcctcatttccacaggcagctggaccaagggccttctttttgtcgggactcatgatcacagggtgagggttgggtctgggtccctctccctcttgctgatgggcacccagaaaccaggcattgcagtaccacttggaaatggggagaggggtgtcagaatgccaaagcaggaagagacacaggatgggaaagcgaggccccagaggcctttgccatccaaacctcaagagacaacccatccttccccctgcttgtgggccagctggaaccacaggttttccaaacccaacgcaaatctttctgcaaaagaaaggactctgggaatcgattccagaccctgcttgacaatgaagtctgtgctcacacaggcagtgccaccagacgttttatggagtatgggcattggctcacgcacttgccaaggacatacaggtgctaggccctgagctgggcgtggagaatttcaggggcatcccagaaccctccctggcctcactgacgtctcagcctggcagtgagaaaacagacacctggggtggagagtggcccaagtccatgtctgtctttgccagctctcagcacccactgtgcacctgggagacgtgcaccagaagctgagtacaggcaaaagataataccactcacccctgccctcatgggctcttgcctggctgcagaaggcagatatcatctcgtgaggaaatagggcagatatcatctcatgaggaaatagtcatttaacaaatatttattgagcgacttactgtatgctgggcaccgttctagagctgggtattcattcgtgaaaagaaagagacaaaattcttgcccttgtggatcttctattttcatgtataaacataataaatatgtaaaaaaaatagaaggtactaagtgctgtggaaaaatagagataggtaaggaagatcgggagtgtaggagagggacaggttgcaaaggtggtcaggcctcatgaaggtgacacttgagcaaagacttgaggcatatgagtgagccatgcagctgtctgcaggaagagcattccagataggaagacagccagtgcaaggccctgaggcaggagttccctggggttttcaggtgtgctccagtgtggttagaacagagtagagtggaaatggaggtataacaggggacaggtcagagaggtaatggggtccgggccatggggagcttgtcggccattgtaaggggtttgccttttattttctgtgcatcccttttactcagcgtttgagctgagtagaagcatgggtccctgactgctaaacagggcccctgactgctgtgccaggagtggacagtggagagtcagccaggggaaccgacaggaggctgttccagagagtaggaagagtggtagcaatggaggaagccagctttagggtatgttcttgagatagagctgaggggatttcctgctgggttggatatggggtatgaaagaaagagaggtgtcagggatcacacagtggtttatggctggtgtggctggaaggatgcaattgccttgagctgagatgggaaggctgtgggcagcgtaagttttgtaagaaatatgaaaatttcaggtcactgtgcagggcctgagagggcaaggagggaacccctggagtaactgaagcatcaagggaagcttctagaggtggggtagggggcaccaggcagggcctgcaagggcggggagggctcaggggcaggggttgggttcacgctgggaggaaatgtgcattaggtgtgcagagaggcagcagaggcttggcctctgagcagggagctgacctccgcattggttagcattgtctgcctccccctcagcccagcctgcctcctgggcagctggcgcaatcaagcacacacttacaaatcccttctgtgagtcaagcccttctgctgctgtctctccccattggtggggtggacaggtgagtgctgtaaaagggtgcagggtggtggtggaggggtgttcaggactgacagggtgggctttggagctaaagactgtgtgcctctgcataggtagagctggtgtgtgtgtgtgtgtgtgtgtgtgtgtgtgtgtgtgtgtacgcgcatgcacatgcatagctgggaattccaggacaagggcaccatggagtcagggggtaaaaaaggttggggtatgctgccagagacctgcctactgatccttaggattaagagttctggaaggctaggtaaggtcaaaccacagacggctttagctgccactctgagacttctaggcttgattctgtgggcaatggggagccattgaagaccctgggcctggcttgatggctgtcctagctctcaggcttgagctgggttacatcttcattatggggcaaagtggaatctgcagccaccttgcctgcctgctcaccaagcaggtgtggcactgccaggccagtgctgacaagttaatttcctgattatgagataatcatttcctagggaatcgggcagccagctcccgccgtggaggcctctctggctcatctttattcaaggccctgctctgcagagctttctgcttctctgccacctaggggctcctctggagtctggctgcgctagccaaaacatcccgctcagcacatatttcacaagcaactgaccagttcctcctggactttgtttatcctccagccctgggctcaagagattagggctcttttgcattccactttccatcatttgcccctcatgaggaggaggcttggagaggaaagattccagagacaaggtttactgaacccacaaaaaagaggaagccaagagggaaacaggtgaggtgtggacgagcaatgggaaggcagccacagggctctcagcgccaggcagcctccctccaggaaccgctgggcaggagggaacagatttctaatgaagcaggaaggatttaggtcagaaggtgggagaatttcctgactgctaaagtatcgtctgtaggggttgtgagagggctcgggctcttgcccaaggctggggaatgaactgaacagctcctaaaaagtattttaatctccaagtgtttatcgatctatccaacctgtgttcaggggccagctagttcagtctccctcatcatccagatggggaaagtgagcctcagaaaggggactggggagactggacaagacagtgaactcacctctggagcttcccccctgagaaggccccagctgcatcccaccagggaaggggcagatggtctttgtcctccggttcccgagggcgggcacgggagccgtcagcaactccagacccagcattgagcaggaggacagggtgggcttgtcccgagcacacaggccccaagagtcagtgtgacaggttcctcctactgtgctcctgcacactcccacagaggaagctccaggggcagagccaggatatagaacattggttctgtcttctcggctccgtgtcttcactgtcctggaggtttgaagggcatgctatagctaaaaggcttaccccacatcagtggctggctgtctccctgtggaatgaatggccctgggaccgtattccctcgcacgcagctcctccccagccgagcatcctggctttggccatctcaagggtcttcgctgccccgtgactcagcatccctgccatcctggcccaggctctgtgcagcctgcatctgaggaagaatgcccacagaggccggcacagggcctcaggccccgagtcaggtggaggacaattagaagtggaagaatggaggccatgaagcctgaagtggggctgggtcaacccaaggccacacagaaggcctatgacacagtagggcaagaccccaggctcctgtctccctcctgggagcaagaaattgatggtggccagggttttcctgggtagtctgagcaagcccatccacccagtctttgggtggtgagacccgccccagcctacccccaccagtggtgctgggggcttgggagaagactgagcagggctgtaggtgacccagggagctggctgcgtaccttcatcaggcccaggaggggcacgtacggccgttcactgtagcgtgtttgtggagcggggagttagaggtgacctggaggtctaaaacaggaggctggccgggtgcggtcactcacccctgtaatcccagcactttgagaggccaaggcgggtggaacacttgaggtcaggagttcgagaccaggctggccaacatggtgaaaccccatctctactaaaaatacaaaatttagccagagcacacacctgtaatcccagctgctcaggaggctgaggcaggagaattgcttgaacccgggaggtggaggttgcagtgagctaagatggcgccattgcagtccagcctgggcaacagagctagactccgtatctatctatctatctatctatctatctatctatctatctaggtagatagatagaacaggaggccagctagaagggacatagaggatgcacatcgtggaatcctatgtagcagtgacaggcagtgaactagatagaccttaaaagtttacatggactgggctcggtggctcaccccataacctcagcactttgggaggctaaggtgggcagatcacctgaggtcaggagttcgagaccagcctggccaacatggtgaaaccctgtctctactgaaaatacaaaaattagccaggcatggtggcatgcgcctgtggtcctagctacttgggaagctgagatggaaggatcacttgaacccgggaagcggatgttgcagtgagccaagatcgcaccactgccctccagcctgggctgatggtttcccctgtatttggagtaagcaaaaagacctcatttgactgggtgcggtggttcacgcctgcaatcccaggactttgggaggctgaggcaggaggatcacttgagcccaggagatcaaggctgcagttagccatgttcacgccactgcattcctgcctggacaacagagcaagaccctgtctcaaagaaaaaagaaaaggtggaggtggcgtggggagctggatatgtaccttcaccaggtccaggatcttcctttaaaatgcatactttttgaggtgagggctgatcacacagtctgataataactggacttcacccaacattggccactctgcttggagggcctgttgtaccctacaagccaaaaattgcagaccagcctccttactcctacactgatcgtgtccactagcccccaactcaatcaacccttctttatccccttccaacatcacataatcccccagccccaagccctgcagaggggccaagagcccaagcctgcaggcctggctgctgacgaaatgtcccctgggagagctgcccagagaaggagccattgttccttcctggaaaaacataccagctatgggagggggtctgctattccctgggacctcggcaaggatcctgagggtgaggcgggggggcctggcctgaactcctgaggctgctcctttccagcagcttccccgagctgctgcctcttgtgtcacccccatggccatgagggtgtgacagaggtggagctcagagagggagtcacaggaggccctggtgattgttagagatgtagaacaaagaaacttacaaaataatggtaagagtgattccatttaagttctagaaaaggcataactaatctacagtgattagaagcagagcagtggctgcctggggtggcggaggcggggagaggacttacagggaaggggccagagggtgacagaaacaatccacagcttgattgtggtggaagccacacggctttatacatttgttagaacttatcaaactgtacacctaaaatctgtgcatttcactgtgtatagagtacagctcaaaaagtttatttttataaaaagagtgacaggaggagtcctgggagggcaaggagacctaggatctcctcctggggtaccccagctccctgtgtgaccctgtgcagatttatgggcctgagcctcagtttcctccggtgcttccaaagacattatgtgccttggtgtcttgggggcaggacatggaaaacactttgggttgcctagaacagtcattaaagaggctctcctgacagagcctgaggggctttggaccagtcagtcaccctcaaaacaaaagttgctccactgagggcgagtaggactcagggcctgcccatagaatgccatctggagcggaggagacacacacaggttagtatggtgaaatctaagtgtagatcaatacagatggggtggtgagagaggagaattttgtgcagtctgagatatcattgcaatcaggggagacttcccgcaacaagaggcccctgcctgagcctgagattcctcaacagtaagaggaagaagatgatcatctgtagcgagggtcaaggctcagattgtgaccagcagccccaagctgtttgtccttagtctctcttccaattctccacatgcagtactctacaaatgcccctcctccataactctggcacttataaccctactccactcagttttaatcagacttgatgatatcacagcaattcctgtttttttttttttcctttagctgaagagctttagtccatcatcaggggacaaacagaaatgagactgagattcagaattgctgataggcatcagacctccgtctgtgaccaggatcagggctcggtgtgtgaccagcatcgggactcagactgggatcaggaacagggcttggtgtgtgatcagggtcaaggctcagggtgtgcccagggccagggttcagtatgtgaccaaggtcagcgcttaatgtgaccagggtcagaggtcagtctgtgaccaaggtcagggtgcagactgtgatcaggcacagggctcagtgtgtgtacatagtcagggctgggagaggccaggaacagcattggccctcactggccccacctggcctcttcctcccgctcctccaacttccctgggttgcatagccagctcatgaaatagcctagataggaagggtcaggccacaaaagctttgtggagccatctgtgcagtatttcttgaaactgggcctggggtgggggcagcaagctgtctgatgtcaaatgctgggtctcctgagtcttaaggcccagctaccccaccctatacgcagctgagggaaaggcactgggtgatggggaaggggcccatccctctcatcctcacccctcccccagaggcttccagggtccagagagtgagaaccagctcccagctggcttgagggcctatgggtcccttgggaaatgactgcaaacattcctaggggctcaagtaacagggcctaggctggccaagaagtcccccaccagccaggagccacctcatcctcacccacccttgtactccaagcttcctcatcattccaagtaggtgagatcaccctggctgcctggaccaggctcccccatgaggcccaggccccagggagagcaaagctagggtctgggaactcagggtggtgtggggtgggggatatgctggcagacacttctgccgatggcttagaagccagccttcccctccttggcctcatcttccagacctaaaagctgatgagagggtcttggcagcaggaaaggggtgggaaatccctccatgggactcaagtcctcccaccttgcctgctctcacccttcctgaatccctcaagagcagaggacttcaaagaaactaagaggagcttacagcctcatcttatcacttacctgacagaatccctgaggccagagaggagacggaattagaggccccagaaccactcccctttaagtcagtggctgggctgggatagagcccagggccctggagtcccccctgcccacacccactgctgcccgcacccaccccagcccacaccccatcacgaacagaggagatattccctcttcattccaatgcagaatggagtctggacacctaagtttggtttctgcttattcctagtaactcctgctcagactcctgcatgcccagggaggaaggtggaggggcaggaacaggacggacaggccccgggctctggcacatcctggggaacaagggaccacaaggacgggggcagtctccagacttcccctgggcgcttgaccccaggccttgcaggggagagagccagggcctccctcaggttggtggccggaggttgcagacagaggagggtgtggtcaggtctagggtgatgatggcaggaagtggtggcaggtgatggggggcgggggtatggggaggagtggctgcaccaggcagaaaggaatcctgagaaggtcaggctgggtgcccaggctgagaatcctgccctgtcagcagcctgctctggggaagtgttttccttctagcccatcccttcctgcccaccctgactcctgccagcctgcatccacctggctctgcccatgaaccttcagggacacactccaggccagaagcccagggctctcttggtggtttacaaagaatgctgactgcagggatgagaggaacggagggtgtctgggggctgctgtccagaggcctggggagtaaggactcgagggagtgcctctgtcaggaaattacatggttcactcattcctgcctccaggtctttgttcatgctgttttccctgccgtggacaccctttcccgctctctgattctctaaatcctgccccatctcccagatcttgttcatgtccaagcttttccaggaagtcttagcagctcccacaccgcagagctcgagatgtaagctcttgctgcctgacttccctgaccccacacctgggcccaggacctaacacccaaggagaatggcaaagggttttggggtatgagaggatgtttggggtgtgaggaggtctctgggcattagcagtggccaacctgatgctctcaatgtcatgctcttcctccctccccccttctctcccactgcccactccaggtctccctgacttggtcccagaccccaactatgtgcaagcatccacttatgtgcagagagcccacctgtactccctgcgctgtgctgcggaggagaagtgtctggccaggtaaggagctgaggcagaagtgtagagtgttgggatagtccccgggagtcacccagaacccagcctagctgtggctgccagctaggctgtctgcaagctgatgaccctggccaagtgccccagcctcccaggaccctgaccgtttcatcagtgagccttgcctgccccgagggagtcaggaggggaggggagcaagcgggggcccagcatttctgtatactgtacctcactatacaaggaactccacttttactgtggcacttcatctttatatgagccctgaaggcatgggttaccccctcaggaaactgaggagcaatgaaaggaactcaaaccttttggatctgagctgtttaatgagaaggttccttttgggagcccaggcttccagtggtcatacagggacccaaggaagtcctattgggtggatgtacctgcaggatagagcccaggagtatggagccatgtccacagaggacagttgtggctttggctggtccaggctgcctctgcctagtcacagcaggggcagtgagcccgggggacaaagaagtttcagttatatgttgcactggaaagaggggaaggagaccagtttccatgaacctagaaggtgagcacagctggctcgccattattcatgggtgatcctgcctctcgcagtgtttgcttctaatttataagcagttcatattctgctggaacataggtgctttgcggatacctccctgggccaaaataattagttaagattatgttatctgcttcttttgttaatatccctttatgttgaaagcacctatttttcttaattacctgctttttggacatttgaactctctgtttagtttgactttttactatctaggaaactctttagaatctcaacattttctcatttctagaacttctagttcactgccactctaagtagctgatcataaacccttatctgtctgtaacaagataaagagcttgaactagaatgtaactcaactcactccttcattgagaaagtcttgctttaaaaaaagaaaaagtatccgctgaactaagcagagtgattaggaatgttgtcgatgtacattctggtgcaagttcccaatcccatcccagactggcatcagtgtgggaactgcccctggtccagggaccgcaggctgagtaccactcagccagcctgtctgggcagttcttgtcttgtttcagttgtcttggggaagagagcataatggtcctgctggaattcctccagcaatgaggaacttacagcctccatgacagcccttccagtcttaagagaattagtcaaagtcaaactattaacatcactgcctcttcatgaaggatcctgagtgcccggacctgcgctcccagctggggagaggaggcagcctgtcctctgtcctggagggtctcctggtacagctggagagaacagccctcacctgtaccccagtgacagaaccaagacacgagtgggaaaagagccagaaggactggttcacaggccagggctgctggaggtcagaggagggagggatcagcaagggctgaggcctcagaggaggtgggcgtgggagttcagacctggagaatcctgcaaaactggagccctggggcaggagggccctctgagatcatttcaagtatgggccgcaggctggtgccagttcacatgctgcaggcagaacccagagaagaaaagggaccaattccaagtctcaccaccagtttgtggccaagctgggcctagaacctagacccttatggtttcccacggtgtgctgagccgaacagaagggcaggatttaactgaacagagggaaggaggatgttttgtttcaacccagacatagacagattccaagcctcccccagacaaggctgagggcctttcatcctggcagacagtctgagccgcctgttgtccagacattctctcaaagagagcgctaatccctacgactggccaccgctcccctctggccttaggatcggaccttaatgagtgccagggaagagcccctgaggccaacagagttagctgtcagccgtcagctaaagaggggaggggccttcagccaccccttcctgttcctaccacacatgtgtgtgcatgtgtgtgtatgtgtgcatgtgtgtgtgtctcccctcactgcagcccctcgttcctctttccacccttttccttttgtcacaaggcctacctcagttggaaatctggagtcagcaggtgacttgcgagcaggcaattcataccagacccatgttccctgaatggaaaagggcaggttgccagcctgaagccatgcaatcagggagaggtggtctggacccagtgcaagatgtagatggtatcgggctgtgctgcagtcagtgctgttagagctcacaggcaatccggatcctctatgtagagcaatcagggcagacttcctggaggaggggacttttgagttgaccctaggatactgggtgagttttggaattctgggtcaagcaaacagcatgggcaaaagtatgggtcagggaaaaagttcagcctgtttggaaaataggctttgaagcaggaacccagggtgtgtgggggagtggaagggcagatgggactagaaaagtgaagaggctttgaccagaggacttcacgtctgtttttcaggcccacacccaagacatggcatactttggtcaacaattagggctctgtcttgttgtcagagacttatcagaatctcctggataggacttttttttttcttttttttagaaagggggtctcactctgttgcccagactggagtgcagcagcacaattatagctcattgcagcctcaaattcctgggctcaagggatcagtctccaagtagctgggactacaggcataagccaccttacctggctaattttttaattttttaaaaatttctttaattaaattaattttttaaattttaatttctcactatgttgcccaggctggtctcaaactatgggcctcaagtgatcctcctgcctcgacctccaaaaagctctgtaattacaggcatgagccaaagtgcctggcccccgcaatagggctgtttttcagtggcccttcagagattgctatgtgctcctgcacctaggggctgaccccagctgagtcacctgcaggtatcagggacactgccatgcttggtaccgctttagaaagatgctgttggcagctggcggccacatggtggaggccagaaaggaggggacagccaggatttcacggggtcagaagacagaggaagaggcctgagcctccgccacagttcgaggagacagaggagaagatcttcagggacaaggagtggggctgcagaaccagtggccaagggctgggggtggggctgagggggcccatgctgggttctggtgtcactgtgccccaaccccccctcatctcccccgccgtccctgcagcacagcctatgcccctgaggccaccgactacgatgtgcgggtgctactgcgcttcccccagcgcgtgaagaaccagggcacagcagacttcctccccaaccggccacggcacacctgggagtggcacagctgccaccagtgagtggggaggggctgggcccgtcctcttccacttctcctctgggccagggaccttggtgcctgagctcccctcccaccatgagcactctgggagacacagatactggattagagggcccggggaggtgttacctgccaactcttttcactggggcaagtgtttctcagagaagccttagccaaagctaggctggaagatggatatagaaggattggtctcaatcagggatggaaatgtctagaatacagggcattgcccagtgaggccattacaggtgggagcccaaaaaggaagtgaggggtctagagcatgtgctgtcctggagtgacccagctaggtggggagcacagaggggccaccccgcagtactcaggagacaggagaacctagaccagccaggaggctgtgccacagcagggtcacctgagcccatctcaggatggggacaggatgagaggcccagggaagactaggccctcttctttctccttctctcctctgcccctaggcattaccacagcatggacgagttcagccactacgacctactggatgcagccacaggcaagaaggtggccgagggccacaaggccagtttctgcctggaggacagcacctgtgacttcggcaacctcaagcgctatgcatgcacctctcatacccaggttgggctggagagatggggtttggggcatgggaggataaggagttggggaggcaaagagcgaggcccgctgaggcccggcaagtgccaaggcttctggccactcagctctgctcacagtgaaggtcttctcaccagtcctcaggctgccacactgccctgcagggactgttccctccctgccccagcccctttcccatgttattccaggtgatctgctcgtggagagaaggaaacatcgcaacagtctggagagcaacacgtcctattggcctgttcacccacccatatccctctttccatcagccaccctaaatatccacaaactgtccatctgtcctgtctctttttatccattctgccatccatctcgtccctcccacctggctattagatatctgtctttcctctggtccatctagccagtggctttaggaaggtgtggacccaccctgagcagttgccctgggccagggtcaggggagaaacccaggggaaggtgggccagaaactcctgaaggtgggcgtggggtggctctgggaaacaagcagcatcacagccgctcctcttgtccctttcccagggcctgagcccaggctgctatgacacctacaatgcggacatcgactgccagtggatcgacataaccgacgtgcagcctgggaactacatcctcaaggtgggcctctgggtctggggctttccctccaacctgatgttcatgtccaatgtccccccgttcctgaaagaagcttcagcctctgggcctgttcccttctccccagctgccgagcagaggcagcatctgaggcatcacttgaggtttaggcttcccagccgaagatttaggtctcaggctgacatagcctctctttccataaagaacccagggaacctttgccccagctgtggtaatgccagaggcagtggtgatactgtctccctaagtgacagaggaccagggagagcaagaaagacttggagagccatgtggtctatcttcctgtcttcggacagggcagactttgtatcatttgggagacagatgagaggccctcagctccttatagggacccctgcaaagccaagggctcctgtgactaagacccttttagcctgaacccctcctgctctaatggacactcactccatcacctcttcccttggttgagggaaaagtagaaaagcatattaacaacacacatccagacttggtacatccgtgtaggccaggttgtcatgggcccacctggggaagccatgtctcagcctcctccacacaggtataaaatgagtagggatcattccaccagttcatctggacccactcagaagcagaaaagcagctcagtaaaggcagagcagtgaagccaggtttgcaggcggaggccttccctgcagaaagtcagcaggtggagagatgcatccggcagcggttctctgcagttccctcctgagtgctcttcagcaggctccaagcttgctcctccagggcctggggttgtccagtatattttttcttttcctcattcatccactcaatcaacatgtaggaagtcccctctgagttctaggcactagacacacaaaccacataagcaatgcagttcacagtccctgccctttgggagtgtaccaggatttgaaagttgcatccctgcatctgttcttagatgttctgcaaataaagctggccctaccctagttaatccaacatttaaaagtgttgtatcccaacagctccttttcagacaaaaagcacagatcatacttgggccatcatctcagtgaatgttgggcacgtggggctccagagcaggggatcagacaggccctcgatcagtcacctagacagggatgcatagggaatgactttgagccttggatttggggagaccaggtgttgaatcctggctcagctcctcattactgcattccctcgggcaggatccaacctctctgaccccaaatgccccatgcggggcccacctggcataggctctagctctagggaaacatccaatcttctgataagggggattagatgatgttttcttggattaccagctgcctcttctttcccctctgtgtctctctagcagtgtgtctctgttctccctctctctgtcacctctctgtctgtctgtctgcctctttaccaccttctctggtgagcagttgaggtgcagcccccctgactagactccctttctccctgtttctcttcttcctcaggtgcacgtgaacccaaagtatattgttttggagtctgacttcaccaacaacgtggtgagatgcaacattcactacacaggtcgctacgtttctgcaacaaactgcaaaattgtccagtaagagtttgcccaccacccttcctggctccgtccctttcctgcctggggagcaggcaaggccacctgagatacctaagatacctgcactttaggtcaccttgatggccgaacgcagctgcagcagggcccatcaaaaagagccttgtccgtgccaaccccaagctgagtgtttacggtggggctcaggccgtagggtgttgatctggggctgcatcctgtggctccctgagatgtcccaagtgaaaaccagcagaaggcagagtcatttgatgcaaggccatgagctctgcagtcccagttccacagcttcctcgctatgtgacattgggttacttccctgagctactttcctcaactataaaataggtatttccacataggctggcaatgaggatctacaggcctgatgtctgcatgttcacagtggcacacagtgaacagcagctgtgatcattagtgtccttttcaagtggactggattaaacagtcacagattagaagtgattctggttcaaaggagccatcttcagtccctaggcccccattgtagaagaagtgcctaaaatctgggcttgggattttggcacatgctgctgggtagggtcctcagtctttctcctgattccccatgtgaagtagtttgcagagggaccccttgcttacaagctcacaaggaaaccccaccacactccagatcgaagcaacccttttccattaaaaaaaaaaaaaaaaattagtcctagagctttcagctttagttcatcaactgggagaaaggtggtagagatcttaaggcccagagaggtatctttccctaaaagtgtgtacttattaatggatggcaggtatgagagattaagcctatgactatggtcagggtgtggtgtatggccagggtcaggattcagtctgtgacaagggttagggctcagtgtgtgacaagggttaggactcaatgtgtgaccaggatcaaggctcagtgtgtgaccaggatcagggttcagtgtatacctagggtcagggcccagtgtgtgaccagggtcagggctcagtctgtgaccagagtcagggcccagtgtgtagccaggctcagggctcagtgtgtgaccaggatcagggctcagtgtgtgaccaggatcagggcttagtgtgtggccagggtcagggctcagtctgtgaccagagccaggctcatttagagacagccctctcacacttggttgctaccatcaacctaactgttcacagcatgctgccaccacatcatgaatattaaaaatgggaacagcagcctccagttcagtgcagagattaggttcctcatgagtagaatgagatcagaattccccagggcacacagcatgtttgaaaggacgaactcctgtcccatcactggcagtttggctctttagcaggcctgggtttccagcacattcctgctcctcagggcctgtcttagccattcaagacccagggtcacctaagtggtagaagccattctagggaaggaggaggaaggaagaagggggtatccaggaaacaaaggaggctgctgggggctcggggaggcagggaatccctcctgctgctgggaaagggggatgggaacagaaacagcatcccacgtgccaggcgcctggagcagccaggagggctgtcggcagggcagatggagaagcagcctgcgcggccctcccagctccccgggggcctgtgggcagcagggggagccaaagcccttccttccaagagctctttacataagtgcttggaaaggccgggccttattagagtgtctcagtctctgtgaccctgaccgcaggcaggcagctgggccagcgtgcacaggaagctggacagagcgttcccagaaaggccacgggactgacgcctgtgggtttccatcgtgtttctggaggaaaaaggaggcttaaaaaaaaaaaagtactgagttagaaaaaacaagaaagtatttccagacagtagcagctctgctaatggcctagaaaacaatctgggactagggcatggggaggggaatgtgctgagactgtgccctgggtgggtgggagtccatcaaacccctccttttggagctgggctgagggggtcggaactttctcttgagggaaatgtaggcccatgcctgccctgccacgagggatctgggctgtgggagggacgccctggctgaggaggccacgggggcctactttgcagcccctcattgacccactgtctttccttcctcagatcctgatctccgggagggacagatggccaatctctccccttccaaagcaggccctgctccccgggcagcctcccgccgaggggcccagcccccaacccacaggcacggaggggcatccctccctgccggcctcagggagcgaacgtggatgaaaaccacagggattccggacgccagaccccattttatacttcacttttctctacagtgttgttttgttgttgttggtttttattttttatactttggccataccacagagctagattgcccaggtctgggctgaataaaacaaggtttttctac

SEQ ID NO: 113 - DNA, 63960 bp, Homo sapiens
cccgcccctggctagccgcgcccgcccccgcgctcctgcttcctcccctctttccctccccgcctcccaggcgcgcacccctcccctcgcgcccctcccgcgccctacatccaccgcccggcggagggggctcagtccgcagccgccgccgccaccgccgcgcctcggcctcggtgcaggcagcggccgccgccgccgagacagctgcgcgggcgagcatccccacgcagtaagcccgctttctttccgcttgtgcgcgcgtgtgtgcctcccgcccgccggcgtcctgggtcccgggggagcggctgcccttctgccccgccgccgccgccgctcggggctggtccctgcggtcccggctgcctggccttccagggctgggtactgcggcttcggcggcctcgctgaggccgggggccaggggccgtcccgggctgcggggtgcgggacgagggactgcgagtgcgaggtcccccctggtgcgtgcctcggccttccctgggtttttggctcgatggggactaagaggcagtggggtggaggtgggggggatcgggagtgaaatgggggctctccatgttttcctgtgcgggggatggtggggagtgaggagggagtgaagggggggccctggttttgtcaccaaggatggcgggcagtggggggtggggcgaggtggggacacctcttggttctttcagccaggatagctagcaggggctgtggggagcgggtgaggatgaagcggtgggtcgactcccttggttttcccatcaaggatggcggggatcgtggaggggggagatgggagacctgccttgcttcgctcaacgaggatggcgggggtggcgacgaggagtagacgtgagggggcccgcctcggttttcttgactgggatgcttgtggggtggttggaggatgggggtggggtgcagaataaggagggagggggagggcccgctgtggttcttctgtccaagggggatggcgcgggtttggcgaatgggggtggggagggggtatttcagctccagcgtggaatctagagaagcacgaggaaggttctatcacgggggttgagccttagaaggtgggttttcaaaactgcagggcgtgacctctcccgcctcgaaaaacgtgaaatccttacaaggtgccgtctgttctaggctctgggacagaggtttctgctttcgaagtttctcttcctttcctctctgctcttagcgtccaggactaggtaaaggttaaaaaatcatcaaggctaagcgactgttgtgtcgttcgtgttgagcgctgtattattttctgcatttgggaatgtgcgagtttctcaggtttgttttgattgccttttacaataaaaaccccatactagggagatcccttaggaaaagaaaaggacaaggcttattaatgggatgccaggtttggattttgaatttcctgaagggcaggagatacatccttgtagcatttcgcttggttttgagaagagtagaagtagtagaataagcgtatgtatttgctggaagtccccttgtattcatttaaattatcccttcgggattatccgagccccctttgatttgggtttggaatagatccagttttcctaattggagccatcatcttgtaattgcttgtaattcttctctgggttatcaagtctatggcaagcttatagaacagcaggaataattttttccgtcatcttaagacagttttaatgtaaacgttacggtgttccttgcaaatgtgaacatttgcagaatagcacaagtttaaattatgggcccccctggaattttgtaaagcctttcctgcctcagctcatctccaagaaccgggccctcccgatccttacactgaagaagcaagagcttctgggatggtagctttgcctttacaaactcatgttcatgtttgcttaagaagaatacgtattaagcaggcatttgccttttatgtggtgagactatagtgttttcccatttttggttacataaggttccgatcaagtctttaccttcagtctttaaaaatgcttatttaacatttttaagggcaaatataatctttatgcaacaggaaattggtcagataggccatgatttgtgcaaaccacctcacgataagtacatagtctaagactatcatatagattctgtaaccatatatggtttttgaaattctaggctaccattcccatatttaattttcagaaaaggaaaatatttttttcagccaagtctagatttttgagtgaaactaagaaaaattgtgtaagatttaaattgataaaattcctcctgtataataccagtgcattggaggtaatttaatatatattaaatgaatcgaccgctaaaacaaaataattattttttttcctggaagtgttaaactggaaatgtttaaggggaaatagatttttagtcacaaagaccgacaaaaatgcatttatttacactattgtattataatgttagtatggtattcattctgtgcccccaaatagcaattgaaaaaatagcatatttttataataaaatttaagcataatgtttttttctctgaggagtagaatgcagaaagtggtaaaaaatcttttacagagagaagcatgttgataggaagtgggctttaagtttctctctggacagaaggtgtaaatggcgtatcttttacctggctttttgagaatctgttgccctctaggacatgaaagacatttcaggaattaacagaagtcggatcaaattctcttgctagatgttcttaaagattttgctgatacgcatttgaaaatttgtaaatcacgttttcatgtaagaaattaaccctcacctctaaagtttgagcattaaaaaagtttgttgaaggcatggaaggtaatctcctgtgactgaaccctgttttcccactctccacctcctagttcccttcttccccatgcctctcctttctcccccgtccggtgccagcaacattggcttttataaccttatgggagttgaaccaaatattcctgcttgctcgaacttgaggccttatctttttggctgctttccccagcttttgcctactgaacttttttttgttaattgaactatctagttgtttggatttggggtaaaagggagtagactgtaattgttttttcttaaaagatcttttcttttagctcctgtgggacaagagcagagaaaggttcttttttggtcagtggtgtacttaattaagcagaatatatgacttttcgtttattcaacaaacatttgccgagttacctcctctgttggaggctccatgctaggtgtggagttatttggttgataagaaatggcttccacctttctggtgaagttatgaaaatgaaaaatagacagtgaatctgttgtgagtaatcaagaattgtctggagttttttggacagacaaaaaagatttcttgatgtttacattcagctttgtattactgtatagagtagggagaagtggatggccagcatcccttcctgcgacttaatgcatctctgatggcaaattgggcctccccaaaatatttttctggggtcaactttgaattatggatagtaatggatgatggagcccagaagagtggatagtcctaaatagtagctcgaataaacctttgaccttctacagggttgcttcctgagtgcctggagaaatcccctctttgtggatagtgccacactggtggttttcagccagggcgcttttgccccccggggtcactcaacaatttttgctagatgcactccactggcatccagttggtagagacagggatgctgcttaaatatccaacagcgcatagggcagtgcctggcggcaaacaaaattatccagcctgaaatgtcgatatgccgaggttgatgtaatttcctctacataatgtagcagaacataattccaggagagtagagaacaataacagcgtcttgaggtgactgagtagttggcggagctcactttattcgtctcaaaaatgactagtttcagccaggtgctgtggttcacgcctgtaatcccagtactttgggaggctgaggcaagcggatcacttgagcccaggagttcgagaccagtctggccaacatggcaaaatcctgtctctactaaaaatacaaagaattagccgggtgtggtggtgtgcgcctgtagtcccagctacttgggaggctgaggcacgagaatcgcttggacccaggaggcggaggttgctgtgagctgagattgcaccactgcactccagcctgggcgacagagtgagaccctgtctcaaaaacataaaataaataaataaaagtgactagttcctgcataccaacctgaagaattaaagaaaataacagctaccatttatggcacttactctgtgccagaggacttgtatacattatatattctcttcattttataaatgaggaaccacactcagagaggtagaagatcttgcctggagcctcacagctggtcaaggttagaagtagaaatcaagattaagattattactccttttaagttcatggttttaagcacaactatgcattatctcccttgcggcatgcatcattcaaaatcttatgtaacaaaatgaaaattactatatgtcctatataccattgggcttgcctgagagtaattaaaaccatgaatgctaaatgtgatcatacttggagtaagtgacaaggagtaggggaaaagggaaccaacattaattgaacacctactaaaatttcaggaagcacgcaaattaaatatatactcattgtctaatttgattctcagagcaactctgcagttatgatgcacattttacagatgagagtgggagatatttgttaagtaacttgtctaagattgcacaactaataagcagcaaggttgggatttgagatgatgtcccacaaccaagccactctttgctgcttactctaaaggtaggaagtaagttgagcctcttggagaaaggaaggtaactggctctgggtaaaaagtaacttcaggcagagcgcagtggcttacgcctgtaatcccagcactttgggaggccaagccgggcagatcacctgaggtcaggagttcaagaccagcctggccaacatggtgaaaccccgtcatggctaaaacacaaaaattagccaggcgtggtagtgggtgcctgtaatcccagctactcgggaggctgaggcaggaagaattgcttgaatccaggagtcggaggttgcagtgagccgagatagcgccactgtattccagcctgggcgacagagctagactccatctcaaaaaaaaaaaaaaaaaaaaaagtaatttgagaggtaacacgtagtagacgttggattatattcaggtagagaatggagagatgaattgctataccttcctcatctgataagaatcgaattctacctggaatttgttctagagatctactcaaattgaaacagtgattgtcattttgtcaaacttcattttctatctcacctgaattttccaagctgtgctttgataaccatgaacctggaagttatggaaatctgtgcttaacctttcggtagctcaccttccacctttcttagggctgtcctgtagaacttaggagtgacaacatttggtttttgtcttctttttacacaatttaaacatttgtgcttgctatggaaattgtttttataatacgcggcatcaaattcattcttgtgtttttcatatggggttgttttgttttgacaactaaatatttactttaagttttaacgtgttttgtttcggagcacaaaaagaggaaacatttaaaaaacagcccaatcacaatcattttgtctgaaaagcatttttttgcgggaggtgggggggggcaggaaaaggaccacatgtttaatttcatttgcttcaattggaaaggaattttaaccacgattctcaagggccaggatgctggaaaaaaatgttatttagataaaatgcctgttttgatatccacatagaactgtgagccatagattctgattataataataatgtcctgattctactacagcaatcagccacttgagtaatcaaccactgtgtatagacagacatgcatggtggtaccatctgatttgtcccatcacccattgattcattctagagtagacttgagagatctgatagaacttgcaagaatgaatgatccttttgaaaatcaaatttttcaataagaatggtacattttattgtaggaaaatgcagaaaatatagaaaagcttcaagaagaaaaccaaaatcagtcataatccaccaccccaaaattaatgacaatattttgtatgtcctttaaaaatggagtactttctaaaaatggtggattcaagcccattgcaaaacctccaacttatatagtgtgttatttttttttaaatgactagattttctgaacgactgctacatctctagatggaagtcatggtcataacccatgaaaagggaaagctgacaggtagttggagaactatgctatagcctcttcctggcagctatgtaaagaagcttaagggtagctccttcaaatttctcctcttccagcttgaatgatcaagtttcaatgctaaaagaggctgttagtacccaccccccattattttacagatgaggaaactgaggctcaaaggggtcaagcacctaatgtgctaacgtcagagttccagcttgaatttttagattgtcttcataggtaggtaaattttttatttcctaaagattcttcacagtcaaaaactttttcatggcctgaccctcaaaagaacaagctattgtggtgggagtatactataaaggatactaaaaggccaagtataataacttgctaatttcagaatatgttccgaacagctgtgggcagtacaggaatttttcatgttatttgctttattgtaattgaacatttagtgatggggaacctcttggatgggtctagctctcagtttaattttctctagcctatgaggcaagtgccaaggcatatgaagtatgcctataggtacaaaaatgaaagatgacattgaaagagtctttagacatggtagcctggaagatcgcaattagggcttttgctccatgaaagtatttttttcctttataaagggagatatctgttgaaattgtgggatagagattttaaagattgcatctgcttccaaactaaggtcaaaagttaaattgtagtaaatgtgtgcagtgtggtatcattaaactgtacacacatacgtgaaattgttgttttaatctggcatcttttttttttttttgagatggagtctccctgtgtcgcccaggctggagtgcagtggcgctctctcagctcactgcaacctccgcctcctagcatcaaccgattctcttgcctcagcctccctactagctgggattacaggcacgtgacaccacatcttgctaatgtttgtatttttagtagagacggggtttcaccatgttggccaggctggtctcaaactcctgacctcaggtgatccactcacctcggcctcccaaagtgctgggattacaggcgtgagccaccacgcccggccttaatctggcattcttaaaaaaatcagttatttagctttcttccccctcttctcctgccccatttcatttctttctgtagctgtgagggtcattctctctttgtatctgtttcactctcagggtgactcttttttcagtccacctgactgcactcactttcctttttccaggctctccgtggatccatatccttctatcacattcatctgccactgcatcttgcccttgtccccgtttgccagtgttaacaattaccccaccctgggctgggccagggctgtttttcagcttaggccgggcagggaagctgatctccagggcagatgtggagtgagaagagttgttgtcactctatacagaaatgtcattgacagaataggattaaacaaaatatgtacagagattacataggctatgtatacatgtaaacttgtgaacacaaaatcattccttctttacagctagggtcccagcaaatgctacagctacatgaaataatgagtatggatacctattgccgagggcttactatttgaacaagtgagagaattgtactcttgcctaggggtgtatttttaagtagtttttgctcctgttccttattattgcctgctaatggatacgtatattgtcagtaagtgaccaactctcctagcttcctgtagtacactgtatttctcttctgaaaatggattttcctctgtatttaaaccacagatttacttgtgcctcatttttgaactactatagataaaaactcacagataggaaatacctgtggactgtttgaaatgcagtgaaacctagaaaaaaaaaaacaatcaaaataataagtatctcctgtcggcattttactgcttgtagaattgatattctatttgcccacataaaatctctctggatgttattcctattgcaagacatagtagcttttcttcctgttccttattattgcctgctaatggatatgtacattgtcagtaagtgaccggctctccacagcttcctatagtacactatttctcttctgaaaatggattcctctgtatttaaactactgagatttatttgtgcctcatttttgaactactatagataaaaaaggcacagataggaaatacctgtggactgtttttgaaatgcattgaaacctagaaaaagaaaataacaatcaaaataataaatatctcttgtaagcattttactgtttctttttacccacataaaaactgtctggatgttattcctgttgcaagacattaaatgttctatagccttttttttttttttttgagacggagtttcgctcttgttgcccaggctggagtgcaatggtacaatcatggctcactacaacctctgcctccgggttcaagcgattctcctgcctcagcctcccaagtagctgggactacaggcacccaccaccatgcccagctaatttttgtatttttggtagtgacggggtttcactgtgttggtcaggctgatctcgaactcctgacatcaggtgatccgccctcctcggcctcccaaattgctgggattgcaggcgtgagctgttctgtagactttctaataacaagaatttgtaacagtcacaaggttttaaatttccttttcagtactaaggaaatgatagctgggaatgcaaaggctttattggcaagattgttttgacaaggatggcacaaaactaaatttctatacttgattaatttataagtcttgtcactcacttttagttttagagtgtggataaagctgtttgattcttgtcagatttgaaatgtatgatttatgagacattaaggattggtttttcagtgcactctgccaggtctagttttatgcgtcattctggtttgggaagctgagtgcaagtctgcctacagacataatcaatcacctgcactttcgggtggccaggtggactgaagtaacaggtttccccccaggtttctcagagactaaggaatacacacacacacacacacacacacacacacataggcagacctgcaaattatcggtccaaaaatatttatatcactaagccagagcagtggatttagacatttgacttaacaaaatttgtttttcaacacgttctagcaactaccctgtaaatgatcgtcatttcacctacaacaatgaaaagataaagtcctcagccgcatagcttctagaggctaaagaggcacgttaagttgcttgtcaaagactccacaccttcagatgccagggtcaacacaagttttcaaaccctagacccaatcccttctaggccacagaaggtctgcctcttgtaaggaaggaattttccaatgcactaagcacagctaatcacactaaggaaagaaaccaagcagccaaactaatatgaggaagtgaaagtttatacttgcatcttatagcagatggcctttgttagagccacttttaaaatatcaacttcaccgagcatgatttaggtacaaaaaccggcatccaattaaagcctccaatttgatgagtttagacagatgtatatacccatgaaaccactgccccaatcaggatgtggaatgtttttatcacctccacaagtttatccttgccccttttccagtaacattcttcccccagcccctttcccccagatatcccgttatgcttttgtgtgagagccactttcaaaactcagatttgaaagtttgtggatcttcctctataaaaagactatatttatgtccaaaatgcaattgtcttctctatgtttaaaataatactacagagaaattctaggtattgatttcctagaatctttccctcatcctctgcaagtaagctacttagtaaatagtttcattatgtacttgaattgaagagaaattacagccaagagaaaaacaattctgatagacagaaaagcagtgtatgttcttctcaagtagttacagtgaggtgttaaatccctcaagaaccagagaagtaaaatttgaattttgcttcgtacttatttgtaaagtaaaaatgaagactgagaataaaggttttatatgtatctatctgtctaatcattcatccatccacccatccctccagctagtgtgtgtatatatgtttctgtataaaattactatgtattaataaccctatcccttgaggattacaaaagatttgaaggcttcagagggaattttctgtgcatgaaaggtgtactgtctttacacacttaggtgcaaagcaagcttttcatatgctgttattactctcattgatatatttaattgaactaataattattgagcaatttaaaggctgctgcattgagatggagtttgtcccttcgtttgtcaccttctagaaaaatccaagtgtcaaaaaatatctcgctggctctctgttctgttgctattacttcggcatgcgtcgtctcctcttgccactctcgatttctactgtttctgccctatcttccttccctgattttcctcctccatgtctttcccgtatcctgatgccacttctcttgcactgctctgatttctcatgagaaagccatttttataaacatctccagaccgagagggcagcagactaattccaatgtgtcagatagcatcttggaggctgtttctcctgtgatccaacacttttttcacactcctttccagtttcgagctgtactggaaattggagagttgtgaaaggatggtttttggataatcaaagttgaatatacttgctgggctgtgttatgaccgtctttgaagccacgaatcattaaaaataagtgaatagtttacattataatattcctaggaaacttcctttgataattgtaaagcaattaaaattgtcctgagataaggtgatttattgtttttcagaatgggccataaagatattaaagaacccattcaacatttgtcaaaacccataaaatgcacaacgcaatgaatgaaccctaatgtaaaccctagactttagttcattataatgtattaacgttggcccatcaattgggacaaatgtaccacatcaatacaagatattaataataggggaaactgggagatggatgctaaggaggtatacagaaactcagtacttcctgcttagtttttctgtaaacctaaaactgctaaaaaaaaaaaaagtctactaattaaaaaaaaaaactcttcaaatgtatgggtttcagaaatacaaagactagatcaggagctttttattattaccgtgtggattaaagtctactgtttgtggccaggtacagtggctcatgcctgtaatcccagcaatctgggaggctgaggtgggtggatcacttaaggccaggagtttgagaccagcctggccaacatgatgaaaccctgtctctactgaaaatacaaaaattagccgggtgtggtggcatgtgcctgtattcccagctattcgggtggttgaggtgggagaatcacttaaacgcgggaggcagaggttgcggtgaaccgagatcacgccactgtactccaacctgggagacagagtgagaccctgtcttaaataaatacataaataaataaataaattccagtgtttgtttttcagaatgagtgaaataagagatgtgtttctccttgagtgatgtaacttgtggcacgagcccctgaaaaggggaagtatgaggttccaggagagctgcccagtacctccaatgctatgtctagttgcacaatagtcagtagataggtcagtgggagcagtgggttgggacttcgcttgccacccttgaaacatcatgccatctttgcagtggagtcccagatttggcaaattccctgccctacaacccagtgggccctcttttgacccttgcatttgtggtatcattagcaacagtgacagttggtgaacttatgccaactctgagccaatatccaggtcagagtttgattgctttgggccaaaggctattattgcatggcttgtagaagcataggcccaatgccagaacttccatgcacttactcagtatggccagctctacagtaaacgtgtgtgaaaagattcggtttttataggcattaatgtaaatagtttctttatattggacctgggtaactatgatgggcaattacaagtacccattgctttcctgagttggctatgagaacagaacattctgtggtacgtggtagtgggggtgaggggaggatcaggtctaagagggacattgcagctgcaaagggaaagaaaaaaactgagaagccatcaaggattagaaggcaaatgggagccatcactcaagcactgtgtatcttgaagtggttgtctgtcaggtctgtgataagacctggggtgaaaaacctcatagttcatgtgattatctgaaaaataccaataaagggaagagttgattatagagttcgcctgtttagtttttttgtttgtttgtttgttttttttgaaactgtgtcttgctctgtcacacaggctggaaaacagtgacgatcgtggctcactgcagtcttgacctcctgggcgcaaacaatccctctgcttcagcctcctgagtagctgggactgcaggtgtgcatcaccacacccatctaatgttttagtttcgtagaggcagggtctcgctatattgtccaggctggtctcaaactcatggcttgtttagcttattaaactttattttgtatattggaaataattctttgtgtacagatctgttaggtgtcctcattgttacatctattgttagacagaattttatttttcttaatttcattggttgcctgaattgactatatatgtggtaccacctgttaaaagcagattttgatgaggaaggggagaaagaggataaaaataacctctccctcaagtcccatttcatgatggaagctaggattccagttcagtggccaggctaaatggtcacttgatgccagtagtgagctactgccactggatttctttcagtcagcttcacaatcgacaccaaatcctgcagctgacgtgactttactgcaattcatgttgattggaaaaatggcaaaagtcaccatctaacccaatcataatatgtttgtttcccagatatagacaggctgggttcgtcattaggcctagtgtagtcatgctccctaactactgtgagtatctggaaggattggggaggtatagtggcagcggcttgtgggacaggcatgtgacagcatccttttgcccccttgctgctcacccacctgcttcttgccacctattggctcctctttgtcttcccctcattctgtcttctctttatccttaatccagttacttttgaattttctgttaaggaaccaggagagcctcagcatgaaaataattggcttaagtattcaaagtaccagagcaacatactttataattcttggactgcctgattgttactgctgcagtggtttgttgggtattaaatgagacttagggtattttgtaaacgttttctgacatacaatttgaaagttgaattttgtcaccttacaaacttagttattcctgcaacttttaaaacccccctaaattttccttatgtgttcatgattatccccatagcagataatggccacatgcgtgctgatatgaaggatttgctccagggctaattgatgggagcagagctgcccagttgctgaattgtaaggaaacagttcatggagcgccaatgccaatttaggaaaagtatggggctgagtacttagtaagatgaaataaaaaaatatttatccagtgcttactctaaggagaaggcacttggctaggtttgctagatgctgtggggagccttaaaacaacagtgatctcttcaaggccgggcgtggtggctcatgcctgtaatcccagcactttgggaggccgaggcaggcggatcacttgaggtcaggagtttgagaccagcatggacaatatggtgaaaccccgtttctactaaaaatacaaacattagctgggtgtggtggcatctgcctgtggtcccagctactcaggaggctgaggcaggaggatcacttgaacctgggatatggaggtggcagtgagatgagattgtgccactccactccagcctgggcgacagagagagaccctgtctcaaaaaaaaaaaaaaaaaaaaagtactagcgatctcttcaagcaaagaacgcccattctaattggagaagctgttaaagacacatgaaggatgtggtggaaagagtattgaactgcatagggtgtggggagagagtcaggagttttgaatcctagcctgagttctgccactaagcattggaaactctgggcaaatcatctccccactctgggtctcagtttataaaaaggcaaatgaacgagatcatctctaagatattctgtagattgattcataaatgtggaagagattctggaaaacggaagcttgagcccaggagttccagaccagcctgggcaacatggtgagactctgtctctacaaaaaatacaaaacattagcctggtgaggtgatgtgtgtttgtagtccctgtttctcaggaggctgaggtgggaggatcacatgggcccaggaggctgcagtgagctatcacctgggagcttgttagaaatgcaactttcatgggccccactccagacctagggaatcagaaacgctggggatggggccccgccatctgtgtcctaacaaggtcctctctcaggagattttgaggcacaataaagtctgacaattacaggctataggaatttgggtcagtggttctcagcctctgccatacaatagattcatctgggggaactttgttgggggtggggcgctgactttgtttgtgctgctgtaacagaatatctgagactggataccttataaagaacagaaatctatttctcacggttctggagactgggaagtcccaagatcaaggtgcaaacaggttcgattgttaagggctgctctctgcttccaagatgacactttagttctccagcctccagaggggaggaacgccctgccctcatgtggcggaaggcagaagggcaagagagccaaaggctctgttgaagctttaatcccatccaccagggaggagctctcccggtttaatcaccccacctcttagaggccccacctctcaataccatcacattgtccattaagattcaacacctgaatcttggacacatgaaaaccgtagcaggcacccaggcatcactagttgctttggctctccaggtgccgccaattttgagaatcactggtttaggggaaagtggcatgaaccaagacttctgtcattctctagctgcaatgaacgtcagatgcagggagtcagccaaagccagaggcttgaatttcactcaaagaaacttggcctttagattacaatggagaaaggtttttggcaatgggagtgatacatccgaggtggaacatttgagagatgattctgatgctagctatgtgaagaagagggcatacccatagttaagaaatctgatgaaatagtctggtgtgaagtgataatgggccaaattaggaccttagaaatgaaattataaggaagaaaatgtatgaaagctcttttgcaggaaaaatgggcagggtttggcgatggttgctggggtgacagcaatgttagaatgtctttggttcaggagtacctctcagacttctgggagggccagtgctctctagatgcatctggcaaaattgtcatgtatggatctgtacaattctttgttttttgttgctttgatttaggagttataatgcggaggtgacccacagcaagttatagaaaaatacagaattacagtcacctcaaaagctactcatggtcatcatgtcagagggaaaaaatgctgtttttcttttaaggaaagaatgcttggagttgtgggaaagttgtagacttggcaatgagtaattcaagcctatcagtcaattaagtgagtttttattttatcatttgttttatttgggagctgctgtaatagtcattgagaggacatcagtcttcatatttttaaaacaaaacaaaaataccattgaacattagggcaaaggacaagaatttcaaggtttttaccttttgacttcagcaaatatttgctgctccatttttcttgctagattttgccatttgacttgtgtttttcctttgttccaatttgttctttgtgcttgataactgtagtgtactctatttttttttttttgagacacagtcttgctcttttgcccaggttggagtacagtggtgcaatctcggctcactgcaacctctgcctcctggattcaagtgattctcgtgtctcggcctcccaagtagctggaattacaggcacgcaccaccatgtctggctcatttttgtattttcagtagagatggggcttcaccatgttggccaggctggtctcgacctcccaaagtgctgggattacaggcgtgcatcactgctccttgcctctattctattttcgatggcttttttattcataagtattcttaaggttttaatattccagttaaaaaataaatatatttgtccctttatgtttttccccaatatacttattcttcctttatgaccaaaaattattcaaatttgcatccagaaatggctcacagaaagagctccttggtatttatttagggcatggtgggaccttttgttagtttctaggtcatgccacatctggaaggaaagacaccttttatttactaatttgaaaatctatgaaagcagactcagtattttacagggttgcatatattcctatgcaaagttgcatatattcctatgcaaagttaaaaatgactcactactccaactttggtaaatgtgtgcactttagtttttgaaagaagtgcaaaaatctgcagaaaaatctggactaatcataacttgaaatttttagtatatctggtagataacttttaaaaatataacccatcttttcccaaactggatagggataattcctctctttgcaaattgtgaggaatattatgattgtatcatataaaataaatatagaaacgtgtagaataaatgatcttccagagtatatagaggatatcaccagataatactctgtactaaatataaggacacaaaactggactttattatatttctataactggtaatatccttccagtttttgcttgtttattaaatgaatatactgttaaagatttggttatgttgtagatcttaattatgttggaattattaaaaatgaggcatctttaatctgtactgcttatttccaataaattattttgccgaatgagagccagtttaccagttcttttgttaaagaaaatgagccagtggctacctcagttgtatttatcattgccttttatggtaaacatttaaaatgtgtttttaatggtgcacatgccgatgtttctgacctctatagtagcataagtatttgaataaaagtgaggtaaatgagaagtctgtgccacccagtctcatcacaagtgtacctaattaagaagatgtttggaattcactgttctttgatttcttgggtgggagagaatattctgaaggctgtgattaaggaatcgttaccatgacaatcacattcaaagaattgagaggagacaatgagtctgtgggggatcatctcttttgattgatttgactcttcttttaagttctttcaaacagctgttgtcactggattttcttttccacgtaattcacacaattgattggtgatgtggggatcattgaagcttggttgtcagtagtgataagggtcagcagtgtccatgaccacaatacttttgctaaacctggagagtgattgtatgtgttaaatgtcactaaaaagtaactcttggcttctttctggaataatatatgtggtttgtctattttcacttattaattttgtcagggtgggatatgattatcatgatctctttgaaagcatgactaactctaaagtgtttgagctttattttggattactttgctgtcatcttacccagtgttttgtgtgctgttttgtttttattctttaacttgcacaatgttgtcaacgtaatttatatgatgttctggtcagagacacagttacacgctgcagattgaaaagtacacacaaatatacccaccatgagtgcttcagcctcacgaccccagctcatgttaagtgggacatgctagtacagatgataaagtgaaatggagatacaaaggcagttcagatctgactgtcaatttttctcctttgtggactaattctgggtggtgaaaccatgaactatggaacgaagactgctccagcatgagtctgagttgaatcccatgtgagagctttgcctcctcagcctttgggcctttctttcttctgccctctggagggtgtcagagaacatgaaatgcaaggactttctggaaaggatagccagggtttggtctggtaactagaagacactttccctgccccttccccaccaccccctccaagccggaacatgtagaggtgaggagcagacagagagatggcagggaagccattggcaaggtgggaatcttaggaaggaagtgattccggttcttgaaaaagacaaccggattccattaagtagaatcggtatgaattgtactcatctctaggaaaaatcaattccagaagggtgagtaagatgaaatatgataagactagtgtgtgacagattcaggtttgaagcttaaggtggatggaatcgaaagaaaggtatatttggtgtcaagtgtttgtggcggcatgtgaaatcattatccacgtttgataacagtttgactctttgcctgctataataatagtagtaagtatgtatttaacattcaatgcgtaccttgtgtgggggaggcactgctaaatgctttgcatggacgtacctccttacctctatgaggtaggtggccattatgatgctcatagaggctggacagctaatatgaggcggagcctgtatttgggctcaggcagtctgactctggtgcccctgctgtgaagagctgtgccctgctgcattcctcctgtagctgcacgaaagggtgtggaatcttctagaaacagtgagttctatatgagtggagtgtggtggtgggagaatagatggagtaaagccttttgtgtaaacataccatgctaagtactgggagatagaaacgaaatgagagatttttttgttttgttttttgagatggagtcttgctctgtcgctcaggctggagtgcagtggtgcgatctcagatcaccgcaacctccaccttccaggttcaagcaattctcctgcctcagcctcctgagtacctgggactacagacacacgccaccacgccggctaatttttgtatttttttggtagagacggggtttcatcatgttggccaggatggtcttgatctcatgacctcgtgatccacccaccgcagcctcccaaagtgctgggattacaggtgccagccaccacacccagccaaaataagacatttctttgcccctgccaccaagatatttaacatcttacaggactaacaaaacctaacatgaaccagtccagattcatatgatagaatatgaaaatgttttctggaaagaatagccagagtcccagtctggttactagaagacactttccctgtcctttccccacctgtagcccttccaagctggaatgtgcagaggtgaggaacagacagagagatggcagggaagctattggcaaggtgggaatcttaggaaggaagtgattccggttcttgaaaaagagaaccggattccgtcaagtagaatcggtatgaattgtacccatctctaggaaacatcaattccagaagggtgaattagatgaaatatgataagactagtgtgtgacagattcaggtttgacgcttcagttggattgaatcgaaagagaggtatatttggtatcaggcgtttgtggtggcatgtgaaatcattatccacgtttgataacagtttgactttttgcctgctgtaataatagtagtaagtatgtatttaacattcaatgggtaccttgtgtgggggaggccctgctaaatgctttacatggacgtacgtccttacctctatgaggtaggtggccattatgatgctcatagaggctggacagctaatatgaggcggagccggtatttgagctcaggcagtctgactctggtgcccctgctgtgaagagctgtgccctgctgcattcctcctgtagctgcacgaaagggtgtggaatcttctagaagcagtgagttctatatgagtggagtgtggtggtgggagatgagatggagtaaagcctttggtgtaaacataccatgctaaatactaggagatagaaatgaaataagaaatatttcttcctgacaccaagatacttaacattttaccggacaaagaaaacctaacatgaaacaatccagattcatatgatagaatatgaagatactgtctctacttaagtacaggtgggaggaagactggaagatgttcctttgaattaagtcactttaaaacatttgctttcaaatgttagcgcttcaccatgggcacaaaatttgtcttcctccaggcttttggcctggcaaacaagaaccctgtccctatagtcagcagattcatccattttgagttgggaagcattatcttcagccttttcttcctgacaacgatcctgacaatcgtcgtcaggatctctaaagagatgaactcattagcctagtgaaccaacagtctcagctgtttatttaccagcacattaacagtttttccatttatatccactgcctgtgtgacgatcagcctggaaatggtttgagcatagggtgggaggggtggttacacacctggttgtaatccttggtttatttttgccctgtttccatctatacttcttgagagcttcctgtgttacaggcactgacctgggtgttggggcagagtagtgaaaaaacagactgggtcccccgcccaaggcactgtcttttcctcagatttcattcgctcatgtacattttcatagttgatctaaaagcggcatttggtgtgaattctaggatttcacacttttaggataatacagtgatcacactccctttctcctttgccccagccagtcctttctgaataaaggtcgagggattgggggaggaaggcagtgatgcgaatgggcctgtggggaggtcgcacgggcttgaggagggcagcatgtcgtagcgggccatatttgtgtcagggttgggaacggcacaaggcacacctgtttcctagtgctgcagaaccctcgtcctgggatgagcctgcccgctagtctgcatcctaatcctgctgttgattggagataacttcagcggtcacagggcacctcgtctccatggcaacccctctaaatattcctctagtgacttgtgctctacattctggctggatcagagccctcctgtggcaaaatattctaaagatgttaaaagagagagagagaaaaaaaaaggctcaactaataaatctattctaaacgactgagtcatttgttttgattacccgggtgattgccaaatgttaatttaaaactgaaataggccatgagctcactcccctaacaatgctgagtgtttgagctaatacggcttgataatgagggagccagatccactgccagtgctcatgttatatgataaacagacatttggagaagtatgcagaacatcttggcagttttcctttaactctaagggttgtaaatacaaagtagaatgtgttaccatgagccatttcataggaagttgactttatttttttagaattcagaactttgcttctaaaaaggtaactttgcctcttgattctcatttttttccctaacttaggcaccttggaagttgttttcaaccatatccagcctttgccgaatacatcctatctgccacacatccagcgtgaggtaagttttactaattgccacaaattcttacactgatctccaaccttctaagttgtggtattaggggcggcattgtacaaagggctttatttgtaccaggaggtttcagaaggttcattttaattgactcaaccaatgtcactgcttaccctaaatattagctctcgggggcaatgtcttttcaagggaaaatctcatttgctttcaacttgggcatatgaaaagggaatttgccaggcacaacagaactatttgaatgtctgctttaaagtaaagatctgctcatgtcgttgcacgaacagtagggagcaggaaagctgcatggagcaaatgctgggatgggacagaggagactcctgctgccagccacgagaaggttaggctgacctgatcagctattaggaatctttctccctgggtggaaggagccaaggtgcaggactggcattgcaaaatctggtgatagaaggccaaagagtgcttctgctcggtgacattaatagggtccaggagattttcttctgatttgccctcaagttcagaacaacctgtgggaagccagtgtaagaatgcttatactggataagcgttctctgtcctcttcatttagccacagtggcttgtttatactctgtgatgactcagggttcctcaattttctctttgagagagggacattgacctttgaaaataatgaaggaatctaagagaaggctcatccaggcacgatacagtaatggtccctcctttttggtgccccggtctctgtgcgctcacaagagggaatgtaacctttgccagcaccatacctgtcaggctttgccatttcatccctcaaaaggttgctgcgtttttgccttcaccttcaccctgcccacccctgcatgcagccacatggtcagtgtaggtacttagatttcagttagggtacatgctcagcaggtgacaagaattgcctttgttatgtctacttgctacagaattctccccaggttttaaaatatatatcttcaaatacctaaatgtattaaaccttaaagagtaaaaagcataggacaaacttttagaaatgctaaacctgaattttatccatttcatcaattatggtggtagtcggaagtccttccaaggccctcgggcttgaagcaagctcggtgatacaagctttcagcagcttccctctgctgctggagatggaatcttcatttctgggtctaaatcctgccatagctctcattcatagcctttacctataatggttgttttcaaacttaaaaaaaatgatagaaacctatcttcaaaaaatacaaatctttagatctaaccccaatagagaaaaccaaagctgaactgctttggctcaagtaggaggctgtgactctctgtcaccctcctctaagggtgaaccctattgaaagagcagagattttagctctgtgccctttcccagctcttatttttattttcccacagaagaggctagattctttaaggagatataaagaagggagagagaaagatataaagattctttaaggagatacaaagacatcctctcatcagctggaaatgccagctaggtgagacctgactatgcatatgcattgtttgcccttagtaattccatagcaatctgcaaattcaatcagcttcatcagcagaaaactttgatagaaaccatgtgtaaaagggctgtgttcttaaagtggaacatttaaatcgaagtttttcaagcacacatttcaagtggttttatgataccaagcacaccccagtgacatctttacattgaccaaaacttggtatccttgggttttcttttaaagcactgagtttctcaggtgtgtcagttgaatagaatctgctaaattctgttttttttatttttttaaattttttattgatttatttttttttatggagtcttgctttgtcgctcaggctggagtgcagtggtgcaagtgcagtggtgcgatctggctcagtgcaacctccgtctcccaggttcaagcaattctcctgcctcagcctcccaaatacctgggattacaagcgtctctacatcaacatgcctggctaatttttgtaattttagtagagacagggtttcatcatgttggctaggctggtctcaaactcctggcctcaagcgatccgccctccttggcctcccaaagtgctgggattacaggcgtgagccactgcgcccggccaaatctgttaaattctgtttccatgtaacagaaatatataggattacacaactgcatctggtgttctttcttcctttcttttattcattcattcagccctactatgggccagggcaggaatgtagtggtgagcacaaaaacaacaaaaaaataccttttgggtttgatattcttcaagggtgggacatgcctagattattttctcttttgcagacaaggaaactgaaaattgctttgcttttctcaattacattgcccagtattcagtagacaggtatggatgcaggggtacagttccaagtccccatctctactctattctttgagcctatgatttatgccacttccatataagcatgtgcaaataaagtattcagtaattgccatggatgcagctgtccctgggacccgaaggccctaaaatgaaaataaatgtaaactgtgcgtttcacactctatttttaaaacgtttgtttggaataattgaatagtttagtaaaatgggctttgctgtttccacatgaggatatcttgttcttttattttttattttttttgagacggagtctcactctgtcgcccaggctggagtgcagtggtgcaatctcggctcactgcaatctgtacctcccaggttcaagcgattctcctgcctcagcctcccaagtagctgggattacagatgcgtgccaccatgcctagctaatttttgtatttttagtggagacggggtttcaccatgttggccaggctggtctcgaactccttacctcaagtgatccgcctgctttggcctcccaaagtgctgggattacaggcgtgagccaccatgcccggcctattttgttcttttaagtgatggtgtgtccccttttaatacagtatttatcatagataaactttattattcagaaacttagaattattccatttggctgccttttagtttacagaattatttggaacacaagcttgaacacataattcttaacacatacgtgaactgggctaaatttgagtatttgtaccatagtagtgacaatattgttaattaaacatgtgtttcacatgtaggagatatttgtatcactgacatatggtcattttcattattgatttggcagttttttaatattcacaaaacacaaaattttgaaatacagtagtcaaagtgatttgatctgtgccatttgtattgatgtaacctctcttcttggtgcactagcaataagaaggagaatcagcacagatgggttacacagacttagaggatttggaaaccatcactttagagccaaggtctcaaactgatgggctggatctggcacacagaggtgttcttttaaaattttaattgccagcatttaaaaattgaaaggtttcatattttttgaagtccaaatttttcagcttctcttgaaatatcagaagatctggcaatattgagccctcactcctgtttggctacactaggctggagccaaatggctgctgtttcttttctttttttttttttttttcctgagatggagtctcgctctgtcacccaggctggagtgcagtggcgtgatctccgctcattataagctctgcctcccaggttcacgccattctcctgcctcagcctccccagtagctgggactataggtgcccgcaccacgcccggctaattttttgtattttttagtagagacggggtttcaccatgttagccagaatagtctggatctcctgaccttgtgatccgcccacttcggcctcccaaagtgctaggattacaggcgtgagcccccgcacctagccagctgctgtttctttagctagagcatgaactctgaagtttgccacagtctctggcagtatctgtaatctccttgacactaaggacaagggttggttgccattatctgaatgtttaacccctatagacatgtgagttttcaatcccaggtctagataaaattgaggttgcaaacttaaggtcatcctttttctcaagatatcagcttgctaattttcaggggcacgacatagggtgacagtcatattaaggaggtgctttaaaagggttgagggcaaacatttcagaggaaggttactttctgatgatggtacctgattaagaaaaggatacatcgacaggtacgggtgatttattttattctggcagattcctgtagtctactttggtgcttctcacactttaatgtgcagattctgatgcagcaggtctagagtagggcctgagatcctgcatttccaacaagcgccaggttataccactgctgatctgaggacctccctctctttgagtagcaaggggactctaaaagcaatcctaagaaaaatcagtcaggcagtgatggtgctaatgtttagaacattcacttttctctagcctgagaaagaaaaagagatacgaaccagggtattttgggttgaatcttcccagataaatctggatctactttgagttggagcagaggagatgaaaaatcaattattttcaatacagtatagcacatgggaaagataaatctaactctgattttaaaatttgttttaaattaagtgcttctggtaaaaaaaaagctagatatgctcaggaatcatgaaatgtagggattagagcttttaattttaggaaaatatggggctgttagcaaacttgtaaatcagaccacagaaaataggataattatcaaatccctggttatatgataaccttgtaagctataaaatgattttaaaaagttggaaagaaagaaatcaacagtttcaaatatatacagtcctatattgaaaagtataattaaaatgaaaaagcacaccaggaaaaatctgtggcacagatgacaagatacataatttctatatcatgcacagacctcatacagattgtaagaaaggtgcgcacaggcctagcacgtggtaggtgcttcctaactgttggctgaatgaattatccaattgatagatgggtaaaagacactcaagttatatcacaatgtaaagaaatgcatggaaaacactcagcctcactggtatgcaaagataagcatatttgaacgtcagcaaggcacacttttactaagttagcagaattacaaaaagaaaacacaatgttaatatggttaacttgaaatggatatgcacttattcactgctggtagcaaagtaagttggtacaaagccttttggaacattgtttggcaatatatgcctaaaggcacaaagattggtaccctttaatctagtaatcatactttgggaaatgtgttctgagaaacaaattattctaagaaaagaaaaaaagctgtgtaagcattcatcacagtgttatttgtgaggacaaaaagaaagaatttaaatgtctaatgtgaaaaaaatagttcatttattcaataaatagttttgattgagtagattatgatacatctatgcagtggaatttcatgaatctgttaattataattttcacacttacattagcaatatgaaagaatttgtataatacagtcttactaaaaaatgcaggatgcaaaattgtatatatgctgtgattgtaacttgcaaagtgatatgtacctgtggacaagaactagaaggcacaaggaaaaaatgtaagtatcactttatttgaagttgtattcatgttgtgatgttgtttgtacattttgctattacttagatgttgagaatcttccacttttatgtacttaactccatatcacaagccggatattctaatctatcacagagtgcttagtaagtaaccaagaaacatgaggactcctgtctagagcctaaacatggggttccagtgctctagttccttctcgcttgttgtgtttcatcatccagagcccccatttctctttcttccgtatttggtggttggtagaggcatcttggtatataccacatgacaccaagtataaatatttgtttcagagcttttaatgaatgtctagcagtgccaggcagggaatgaattttcatgtttaaaggtccagtgtccacttaaggaacatcttaatggagctacagctcaagagcaagcccatttcatcttctgatttccattagataagcaacaaaaattggctttaaggtcatgagcctccttacagcagtccctctcaccttcagctgtattccctatttcagatatacttgtttctctgctgtaagtacacttttcttttctaattaggtcagttacttcatgtctgtttttcttttttgacatggtttcttctggctttggcaccacatattttccccatatgtcattgcctctggagcttcatgttgcaatagtttttcaaggggaacggagagcacattgctaagggtgggggatggcttttgcctcttttgcctgccctttgcttcagtgagtgttcgtatttctgttgggcctagttctgtttggttttgtagtcttcagagtcagttatgtttggactgaaagatacttaagtaaaaataatggcaagtcagagatatgtctggcaaaggtgcagcacatttgttaaggttactggtttatttatctcccttgtctctatggtgactaaatctgggtctgggatttaatggacttagttttgacctcttgtaacatctcctaacttttcccagcctctgatttagaaagaattcattttcacttgaggagagaaactgtctcacttagaaaaggggtcctaactggactctcgaaaagtggaatctctagtctttgattcttacacagtcttcaaccagagtacccattgtggttgtaaagaaagctaagaagtcatgtagaaatacacacacacacacacacacacacacacacacataatgtctcaaggaaatacttttctttttagtgaaataaagtattatttagttaatgtgaatgaactgtctgtaaagagaaccttttgtcagaataccaaatcaatggaaccattgactggacattatgtttttattttttaaaagtatctcctttacccattacaggattataaatttgcacacatataaatgtttgaaccatatttcagagttcaagtgtattaaattgtgccatggaagtccacaataaagattgggtttgaccaggattctcatggaagaagtcagatttggacagctaagttcaaatctagtgttccatcttcacaattgatgtgaaatgaggacatagatatctgatctctaaggtaggtagagtcaaaccatcttggacttcagttggttcaaatgagcctttaaaactttttctcttctcctgtatggtgctttgagacttataaaaacattccagctgtaagaatttactaatttgttcatctgtttacaggtcttttcagcttctctaagaataagctcacatgtgaattttctttgaaaccccaaaacaaaggagtcagtaaatgattgattatcaagtattgcacagagactgaggcaagggaagtgacaaaagtcctcttctgtccttactccccaagtataaaatattagagttcagatctgtcatcaagtttagttcaagcccaataggaacttgtgattacttagtaaggtttttgaacatcataaaagttcagtgcatatggaagttgttgtaagattttgtccatcatgaacgctcctattaataggcaaagatttgagaagccaacaacagatgctcacttgtaagagagaaccatgcctgggagatgaatgttggatgctccttaacttctgagtttgaaaccttgactcacttgtcttataaccgtggacgtagaatatttgttagattaaggtcatagctaagtcatacaaattttattatgatcagtacagtaagcatagctggggtcaaagcttttatggaaatcacaatgttaaggcctgaagtccttaataatgcttgagaaagaatggcacttttatcatcatcattatcattgtcatcatcattattatcatatcaaccttatatcacatgttgaaagcccagtgtggtgaactgtgctaataattgttataatttatgtatttcattattgatatttcaattttgtttgaacaactgtagggatcaatttaaaataaaaaggaggaaatatataaaaatgtatttagaatagtagcctcattgtcttgtcttatcagccagataagctttgtgctttgtagagcatctctcactgaaggatacctaattattggataaacaattagttctttaacagttcttaggctgggtgcagtggctcacgcctgtagtcccagctactcaggaggctgaggcatgagaatcgcttgatcccaggaggcagagggtgcagggtgcagagatcgcacgactacactccaacctgggtgatagagtgagactctgtcaaaaaaacaaacagacaaaacaacaacaacaacaacaacaaaacccaaaccaaagaacagttcttcacctaagtagaaaagcagaaaaacaatggtttgaggtctttgtgagtctgtggacatctcttaaaccatgtgtgagaggaccatttctttttctattctttttttttttttttgagacatagtctcactctgttgcccaggctggtgtgcaatgacgtgatcttgcctcactgcaacctcttgctcctgggttcaaatggttcttgtgcctcagcctcccgattagctgggactataggcgtgtgccaccaggcctggataattttttggtatttttagtagagacggggtttcaccatgttggctaggctggcctcgaactcctgacttcaagtgatccacccgccttggactcccaaagtgctgggattacaagcatgagccactgtgcccagccgataggaccatttctgtacacattcattagggctacaaattcataatttccataaggtactctctgtgtttctttcccaggaccggtagagtttttcctatgggtggtggtgagagtttgtgtacataattgtcagcgtgcacaggcatagggatttataatccagagggtcttttgctccctacagtggttcaaatggaaactaattggagagggtgagttccaccctttgcattgggctcatgggacaggtttgaactggaaaacagtacaacatgctccagtatttttagcctatcccttatgttcccagctctgccgtttgaactgtcagttctcatagacttcacataggatcttgacctgacttttggtcctctcgtgggtgttttccattttccttactggggcaatctaaggcacaaagagtaaaggatttggtcagagttactgtcttaaattgtactctgctttctccaggaaactggaagcttctgaggagcaagaagcctgatgtttcctcttatgtcctttgtatcatttattatttagtgccagagacttagtaggcatttgctagagatacaattaattgaatgaaaggcattatgtaaattacaaaccatagcattaccgtggtattacacaggactgtcttaggatccctgttcctctaatatccatattcctgaattgttggaggatatgcttgaatagaacaatcccttttccttcactgtagcatgacattatttcttcccggcctgttatcagcaagtttttcgaacagaaaagttgaaattatacagtgaacgctcctattcctaccacctagagtcagcaattaaacattttactatatttgctttatcaaatatccaccatttacccatcttaatttttggatgcatttcagagtacgctgaaggcatctgtacgctttacccctaaacacttcagctttatcattatgtggtttcaattttgactttcttagagctgctttcaaatttgttgagatcctgacatttattttggtggtggctaagaagacgtagtaactcaaatgtgcaatatgctcagttttcagaccctgggagtttctctttgtttgtaactaccagcaagtatacggacacatacatatcgctgtcccttccccgcttcgttatatggtcacattatttgtattgttgaaatttggaaagccagcctaggaaatgcagttgaggggcttgtggatatgaatgaaatcaaagaattggggttgagaatagtagggcaaaaggttagagttagctactataaagggaggatagagttgggtataaggagtggggaagagattcagatcaggaagttatcagcatgataccactttcatatatgaagtctagagagggtttggtggctgttcatatgacctaaaggtcatggattgaataaacactaagagtgcaaatagtccttccagtctagtggttttcatattgtattccatggaaccctagaatttatagacatgtctcagaggttttaccaacatttgaattatactttcgcaagtatattgaactatttttaaaaacactaataagaaaacccaacaaaaacacttgactgtgttttatagaaaattttatcatcctggagaacacatactgattgactttattttattttattttatttattatttttttgagacagagtctcactctctcgcccaggctggagtgcaaaggcgtgatctcggctcactgcaacctctgtctcccaggttgaagcgattctcctgcctcagcttcctgagtagctggaattacaggcgcttaccactacgcctggctaatttttgtatttttagtagagacggggttttgccatgttggccaggctggtcgtgaactcctgacttgaggtgaccccacccgccttggtcccccaaagtgctgggattacaggcgtgagccaccgcgcccggccctgattgactttaacataagtaaaggttattaatgtcaacctaaaataaagttttgactaacacttatctgtcatccatcaaagtcggggtagtatttctatgtgggaataaagacaaaaggtccacagcaggaccattacactaaagccatgggtgttaaggcattggcctgcaaaagctgaagttacgttttggtttccagttaccatgagcacttatccatctgttatatttagatttttttttctagtacctttaggaatctgcaaacagacgagtatctgctttaaacttgaaacgaccataaaaggagagagatggttaggatgccggaggctggctacactgtcatccttcagatgggcctgtgtgaatggattagggaaccttcaaaaaggtctctcttctggcccaaactgctcaacctggtctgaaaatgtatgtgtgcaatattgcacttcatgatgagatgtgatgttcagggcttctttaataatgcctagaaaaaccttaaaatgggcttggcagatttctttcatttggaggctgtggtactcaactttggtgtttttcattccagactgtaccacattctgtgcccatagtttgaaaaacattttggaagccaatacctgcttgtgtgtagctgcagtcagtttttaaaggttttgctgatgtatattttattttcccctaacctttattaagatcttcaaagttgaaatgactttgcagtggccatctttatccccatcatcaacaggctgccattaatagcattttattctacctgttttattactatctatccatccctccatccatcagtctatcttatttttggatgcatttcaaagtgaatgtagcagatttcaccagttaacttcataatattttatacacttgaagtctagctttttgaacagtacacaaatgtgactaaattgctatagaatgctgttaaagaaggtataaaataaatgccccagttttggaaaaaatttaggagccttattttaaaagtaacaggtattctggaatcctggcatggagttggaaaaaaatatactaatttttaaattggaacttttttgtaactctgacattgctgacccctaaaaaagaggggatacacttgtaaattttattttcatcccaggcaggagttaagtaacttcccgttcttatagagaggcaagatcatcttgaaaagtgttatagacatagaatgttggttacgcccacagaatcaattgcatttggaaggcagaggaacagttaactgaggactaagttgatctatgcagggtctgagtccaaaccctggtgtcaaggtgttaagtgcaaattattattattattttttaaagaaaacactcttgttacaatttggacagagagaatggtatggagatgaaaggttctcgtgtatggcttttgctcctatttatgtggaaagcacgccctacattctttcaaagctgtgttgttccctttattctcagtccccagaattgtgtgcaaacacactctcttggcccaggggtttggctgggtgtgtttccttctggaagtcttcactagcactcttgagttagctggcaggagatcccttaaaaccatttccaagcagtttttctcacttccctataggggctaatcctgtactttccacttcagttccagctgctgttgcttgggaagaaacaaatttctgctgtgttctcaatctccagacggtccatgaaaatttaatgtataagaacaaagaggctgggcgcagtggctaacgcctgtaatacctgcactttgggaggctgaggtgggtggatcacctgaggtcagaagttcgagagcagcctagccaacatggcgaaaccctgtctctactaaaaatacaaaaattagctgaacgtgatggtgggcgcctgtaatcccagctacttgggaggctgaggcaggagaatcgcttgaactcgggaggcagaggttgcagtgagccaagattgcgccactgcactccagcctgggcgacagagcgagactgtctcaaaaaaaaaaaaaacaaaaaacaaacaaacaaaaaaaaaacagaaaatatattttgggcagagattagttgggggatgtgggtgggaaacctggtgattagatatatttaaacgtgtcatgtcagtatagagcgtgaattaaaaataaattatatttggagagttgtaagaaatttaccagtcccttcagacagacacatgaccctttaaaactcattaaaactccttggcacaatggaataacatgcactttggtcttggaagaaaccattaggttgcaatgtttttgatttctctaccactgacttgctctttgatcttggaaagtgactgacttgtcctgtgattgtttcataatcacccataataaaactgacttactgtatatagtgaatagttaagtttaaaactatatctagtttccgttatagctcaagtttatgtattattttattagcgtttagatgttaacattaagctttcaaatcagatgaaatttaatttgaaaaaagttttcgtgtatgaatactttatattctgcagttcatacatgcagtaccacccttaattaaatgatatttccacaaatcagtttggaagattttcttcctgcaaaatgtatgtttaaaatacataaaaattgatgggaccatgtacttatggctagtcggaaagtggaaagttttttagatttatgcttaggacaggtgatagtacttgagcttctattcttagtttgaccttgcctcccccacccccttaaagcaagacacttaatctctttaatgtctcagtttattcatctttaacacctgtattcttatttcatgaaaacaatacctggtttatatttggtagcatttaaggacttgatatagaaggtggtatggaagttcaaattatatagaaagtatttgtatgctgaatgataatcttgacaaattactgattactacatttagaaagttacaactctggagggaattgatatttgatattgttttcctgtgtgttctaagttaccaccataacagtaggaaaataaaccctatcctggctgtgttacaaagggattaactcacttcttcaagttgttactaaatctccagccctttaaacaacagaaataaaaagtgttccttattttaatttttccgaaatgaaagtcctataactaaccttggcttaattttttcttttgttgagggctttccaagttattttctttgtgaggaatggaggctaaaccatgtcagttgcttgaagcaactaaaaataccccgtacaaatatgcagaggagtatgcttttgatttttagatcaaaacgaagaagcaagattttatggagcttgcttattatacatttattatactgagctacttgtgccttttcaaataattaaatattaactaaatacaagaggattaaatagctagactttaaataaaactaaaatagccatattagtattttctaaattctgtatcattgaaagtttaggctgatatgaaagagagggaattcctatcatggggattgccagtcttttcacaaagacctgccactagattttgtagtatatgataaatgtgtgtgtgtttattgtgaaaattgtgtgagtcatatgaaaaattaagtctacttgaaaaatcaaaagacattacctacttgggtacaaagcctgatttatatatatatttctttaatgaccatattatgttatgttaaagtttgtatagtacttggacatatattatttaatttcattcctaaaacaattcaatagggaaagcaagacagatattaatattcccatttcatagatgaggaagaaaaaataacttggcttgtaagcaattcagcagagtcagagattgcatttgagatttttgattctaagtctagtgtgctttccttgggttacaacacaataaagtcaaaaacatttactgttattttcattaattgaaagcttaaaatcaatttaaaattctaacagtataaaatttaacagtataaaaatattgttaatttaattttatgacgttaatttttaaattgatttttgaatttgctaaaagtgttttaaaatcagtatcctgtttcacaattcctgaattaatctcttctctgtacatttcctgttccagtatgataatttatataggctttagcatttacttatggtattaaatgagtagacagttggaagggaattaaaattaattaggtcttgcagttcttataatactcctggtttgccacactgaattgccatgacgtggctggggatccctgttttaacatctaacaaagatagctgccagtgtacttaattttaaaacggtctcatctattaagctgctttataaacatcagccccttttctgaagtccgaagttagttttttaaaatattcactgataatggagtgggggtgctggtgacgtttctctttcttgtttatctgtaaagacagggaggtgcaatctaagttaggaaattggtgacaaatagtcatagaacatgggtcacctggcttcaattagttatgtgacctttaagaaaacaagtgcccgtttcagaaaagactgacctttgaggctagagacatcaagctactcctctacttttaggaaaaaacaatgacagggttaatttaaaactctgatgcagacagagttgaaaaatccatgacagatttatataacgaacgtggatggtgttttgttttcccagaatgcagttttaaggtcagacctatgactcagagctgtgcacttccctggtggtatgcatcagtgacatgttgccagtctaatcgtccagaagggcttgtgcccagctcggcttgctccattataatccccagctgagaagccacctttcattttttttaaatagataaggaagacagcatgaacatttgaaactcaaatactatatgtagtttataacttttcagcctgaagacttgatgcacactaagttgcctctttaattttgagaagtataatctccattgccactaatccatcatggtgtggcactgcatgaggatatgttgtgtgcattgtcagtatcggcgttttgctgagtttactgttttttagttcattggcaaggcatcgtgggttttggtgcaaagagcatggatttggaatcaaaagccacttcctctctgggtggctgattagctgagggtaaccttcatatagctggcatgggatttccagatggcatcctctctgcatgaacaaaaacaatgtgccatttcagtaaactttggtgggtgctccctcatccactccagatcttttcatctctttccttttattccctccctttccttgtaaatcaaaactcccattcctttagtgctgctgatctcttttgggggttagaagaaagcagtctgattaaactaacttactactgtttttagttggttcatcctatctttaaaaaatgtatatatttcaaggctgggtgcagtggctcacatctgtactacccagcactttgggagaccgaggtgggtgggtcaggagttcgagagcagcctggccaacatggtgaaactcttttctctactaaaagtacaaaaattagctgggcatggtggcacgcacctttagttccagctactcaggaggctgaggcaggagaatcgcttgagcccgggaggcagaggttgcagtgagccgagatcgcaccattgcactccagcctgggcgacagagcgagactccatctcaaaaaaaaaaaaatatatatatatatatagatagatagatagatagatagatagatagatagatagatttcttacagcattgtgataacaaatatttgtcaataagagactaactgtggtatagctttacaattggatactatgtacatgttcaaaaagtagaagctctttacgtactgacaaggaaaattctctgaatataaataaatagaactagcaatagaattaatagaaaaagcaaggtgcagaggagtatgtatagtataccactatttatgtttttttttttaaaagaggaaaaagaaaaaatatatagctgcctatcttttataagcccagtatctccagaagcataaagaagacactggtatcattggttatcagtggagagggggaagtagatgtctggggatagatagggggaagaatacttttcactatgtattctttcatacttcttcaaaaatacatctttggaaataaacccatgcaaaaaaaagaatgttcacagcagtattatagtggctaaaaagtggaaataacccaaatgtccattacctgatgaatggttgaacaatatgtggtgtatctgtacaatggactattattcagccataaagagaactgaagtactgatgcatgctatagcatgaatgaacctcgaaaacattatactaagggaaagaaatctgccacaaaaagctgcatattgtgtgattccatttttatgaaagcattatgctaagtgaaagaaatcagccacagaaggccatatattgtatgattccattgccagaagtggcacatccataaagacagaaagtaggttagtggttcccacggggtgggggtggggtatgcagagtgatggctaagaggtccaggatttctttgggggtgatgaaaatgcagaatcagatggtggtaatgattgatatacattatgaatatactaaaagctgctgaattgtacactttataaaggtgaattttatgatatataaattattttaaattttacttagagatggggatctcactatgttgcccaggctagtcttgaactcctggcttcaagcaatccttctgccttggcctcccaaagcacaggcatgtaaattatatctcaataaataaaataacatagcaaaacaacttgaagtcatgaacatggaaacttaaagaatcactgtgaacatataaaacaaaagttttcacctaagaaatgtttttattctaaaatattttacatattatctctataatgacaaaggacttcatgttctttagctaccttcactcacactcacctggaattatttcattttataagtgaagattgttaacccaaatgaagccctgattgataaaattttgggtaaaataactaaagaaagaatgtgtgattatctggaattgagatgttgtagctgcaggccttgcccaggctgtgccagtaggagaggaggtacggagcctcagagaatcttttggaccagtgtgccctttctctcctcacagctcatcccagagctgtccctgcctccttaggctgatatgcccctgttcccttccttgtgttctcctgcagtgagctgaggcacagggtttagggagcctattatgataggaggagattaactttggggttctgggatgagatctgtggacctgaaaatatagcctctctgatcctagtcactaactgctcatgcatggagagtgacagctaagaggtccggggtttcttttgggtggggatgtgaggtgctgggtcattatggacatacggcaatggtctgtctacacaatggtcagataatagtcttcttacagtcatcccaactctagatgctttagccggagttcatcttggggtgggtatgggggattgaccacaacgtgtttttggtcaagagtcgggtagatggtgcatattttggttctgccacccctgggaccttgggcattgctgtactcacccaagctatgtctcggcacaaacagcctcatctcctgagctgtagagtcatttctgtaagtggcttgatgagatagggtcttttagatccatgtccttggcatttattcagaattaactcacataatatgatgctaatctgcattctggctggagctgcatataggtagcctcttttcattgttggcctttatagccaacttaagctcagagatgtgaatcaagggtggcctgcctgatgaattagtgcttataaggtaaacccttatttgttgtgttggaaagtttattgactctagccagaaaaggtctaattagccactgggccctttcctggcagggaggatgtagggaagaccctctgcagctcaagactggacaggtgacctagacctattgggtatttatttcattagaggatcaatagagcagagatttgttctccccaggtctccatcatctgttcataaaccctcctgacccatgttgagtccacagctgtctccactgggctgtcaagctgctgaggccaattcctctgagtccctaggactttgagttttgctctctgctgccccagtcattctcaggcccatggtccttgcagctgggctcttggccaacatcctgagcccttatctcttttccacatattccctgtgaattagtaaacttgataaattctatttgtaggaatctgctgcttgggtcggccacatttttagcgtgtagttgaattaataatatatagtgcttactgtgtgccagccactgctctaaatgttgcaaatatttactgctgtatttctcacaatgacccttttacataggtactattatcatccccattttacagatgggcaaatttagtcacagagaagttaagtgaaacttgccaatgtcatacaaccagtaagtgatagaggcaggattcgaatttagatattctggcttcagtctgtgctcttagccactgcactatattctcttgaatcattataaaatagatatactaatctcagggcaaatttcctactatttgtcttggaactaaccatgttaattgttcaaccaatctcatataaagttaagccttaaatttctttcatggaagccttcaaaaatagttatggtccagtctaaaccgttttacctgaatttcattgaatgcaataggacaatcactccttgtttcactctctgtaccttagataatctggtcttatttataccagttaggtacctacttcccatgtttgttcttgttgattatcattggaaatgagcaagaagggtggggatgtgaggtgaatggggtgtgatctttccacgtacatgtcctttgatggcttctgctcctctagctgcagactctccttgcgttctcctttctggacttcgtgttcctgtcattctgtttcatgtacttgctgcctggcatggtgaacttgttgtttgacttcaagggctttgaaatcactcactcttgttccttaagtgtcagctgtttaggtagagcctctgcttccgcatccaacctagtccatatctctctcagctctgcgtcaactactgcttccaagttagccaaagtttatccataaactttgtttttctttttaagtttaatagggtttaattgagcaaagaacgattcgcgaatcaggcggcctctcgaaccagagtaggctaagagactccagcattaaccattaactgtggctgagataacttgactggactcttgctgctgcatgagagaatctgcaaaatgtgtcatctacacacacaactgtcccttagtctcagggtctgtgacccagcttaacctctgttgatgaatataaagtcaagggataacaaaccccctttaccatacatagcattcctaaggtttacattgtcatgagtaaagatcccttgctaatacggtacaaggaatagtgccttcggagtccagacactcagcttctagacctggagcagctgttaactcagggaagcaggtgatctctccatctctgggcctcagcttttccatctataaaatgaggtgattggattaggtggtatctaagaccatttccaactctatcatgccatttttatgaagctggagacaccctcagacctggcccactttatcttcaggtccgccaatcctctccaacttgtggaggagcctatactctgtccttaccatgcacaggttgacgaacagggaagacaagctgccattgagggtggtaatctaatggcagaccacacaccaacaggatcactctggttctgcagctgagttttcacaaaacagtgcctgtcctggcacaacagaagagctccttccacagaaagttattcctatttgctctctcagatacgaatcactgtgggccaccgcgctcctctgtccacctgtggttactcctgcattgaatctgaatcaagacactgctcaggcagtcaaatgttggccttcggggaaacttggcagatgggagccaagtgagctttcactttatgtactttcagtcctctggaaatctggatttcccctgctatcaaaatagacaatgctattgcctaacaaaatatagacttcctgagtgacatccaggtcacggcttgatctctttcctcctgctgtgttcatgcttccacttccgtgcaccatgttaggttcagatgatctactgaccaaaccccagagaaccactcatgagtcttttcaacctttaccttgaattctagggctatcttctatttggggtttgaaaacaccagtgcataataaagtaatgtattaattatagttttttggtaaataaagatagatcgtatgttactagccttgatgtttcacacaatgaagcagagctcatgaattattataacatccctgatcaaggcagttgatctcagttatcagcattaagaataaaggtatggatggaagcttatttgatttgttcttctttcctattatggatattaaccagctgggtaaattatagaatagggtcatggaatgtttagccctcaagcatttatcagaggcttaaaatgttcataaaaggtgggcttggtgaatgccaggacttagcatggttgaaagggtgttttgagtcatggtacatggcaatatggaaataaaacagatatgtcacaagtaggtggtagaaataaactggaagagaattttaacatctaaaatgtgacaaagatttatccttaccagcttctcagtttcctgaaacatttattttcctttgattttagattctgtatttatgttatatatctctttctaaaacattttcttgtttctgttttctttacttcttttacttttttgccacttctgttttttgaaaaatatcatcctaggcatgctctgaaagtcatttgttcggtgttttcctgatagtgatttctggttataggcccataaagtatctgtaggatgtggttaggatagttcctacctcttggtaaaagtctagtagtaacacaggaagggcacagactttggggacaagagacatttaaaactgttactgatcatgacattaccaaaaatcaaaagacaggggccatggctcatgcttcgtaatctctctgtgaatattataaggaaaattctaagccctggtcaactgtgaaatgaacaggtcttcagtggagttaattagcattttccaggtgctttgctgtttacagtgtcctttatttcatgtatcttctcatttgttacaggtcttctttcataccttttccttttctctgagattcagagaccctttggggaggctgaatttcaggtttgttttcattaggaccttacatgaccaaatcccccctcttggggttccaggggtgctccttcattttactctctgatgggtatgccatgaattgtgacatttaagcagtgactttgcaaaattggacgtgtcagtaggaaaaagtactcttcccaccttaaagattgacaggaacatgagatggctgaagctgttctgagcttttttctggcaagagtacataggacaagaaatactctggagagctcaacattgaatcacatcatatcatagtgcatgactagttgccttaatcttgcagttggactcactcaggagaaattgttggcagagggattaagtagcctgacaaaattatattgagaaaaaaacttgcagtctattaatttattagtagtagatatgagggaaagaagagtcatgtaaaaaaaaaaaaaaacaactggacatgaaaccacggagaaatccacaaagactccattacagtttgttatcagcctcttgcccctggccatgactaatggccagtaattgtctgaataagtttttaaccatttggaaatttcttcaggaaaagaaaaatctagtaaagggagaagggtgaccacaagtcaagctgtgaatgaggaagtcctgaaatgtgggctaagtgggtcactgaatttgccgtgtttgattcttcggttgcaccactttgaacttttgaagtttgatcctcccagtggtgtttctgaggtagagaggctaggattagattgcagtgtgagaaatcccacaaacgtgattctactgtaatcttactgttctctctcgctccttgataactgggatcccattaaagggggttcattattgacatctcagaagaaactcattgtgaagtctaaaataaagtgccattcttccctacaccagctctgcctcccatattccccattattttcccagtcacccagagtcacaacctcagagagatccttggctccttccccttctttcagttcttgtagccctgtcacagtgtcccttatatctagtttttcctttccatgcccattgcccctgcctctcattctttcagtctttccttgcatctcagtggacaattgcattaccctgtgctgtcttccctgcctcctctcttctctgagatctgctcttcttatcactgcttgcatgactccatctcattctccccttgcaccagttgcagaaagatcctccgtgtgtggctttccctcctctctagctttcggtcctactacttccttatcttgtgcttctgtcacaccccaaccccccccagctgcatcctgcttcttgaacacgtcctgtgtttttctcataccttaggtgacatggtaccattttcttggaacactccctcccccttgtctgcatgccaaagtcttaatcattcttcagggaccaggtcaaatgccgtgacatccatcaagtcttttctcatctccaaaccagatgtgatctctccctgtgataaatgtcagtaacactttatacctttcttgtaatacttgtaaggctctgccttgcatagtagtcatttgcatatttatcttgttacacttgaaagtaaggactgtattttattctttgtgaccagtaaaataccttgcaccacatagtagggcatctgtccaataaatgcttgtcatatacaataaagcaatggctggggcggcattatctacaggttaacccaataataggtcataatgtatctgcagatagtaggaccataaggatgtgtagataaaccctgaagtaaatgattcgcagagggtcacatggaagggaaacagggagtttgatacctagcactcactgaaaaaagcgtccggatactgctagagtgtgagactagaaggcctgaaatgtaaccatcatacaccaaagagagttgctcccaaacaccagccaactccaccaatagtatataaaggtgcgttgtaaacagtacagtgattcttaaagatattattaaacatcatactgttaatatataacaagattgactaatatgccaatgaaacccgtgactccaggtacctgtgaaatagccagcaagggttctgagccactgatccaagacaggacaaagttaccaactattcttcctaagaaattgtttctcatcatgcaaggggctgtttctgtcttggttttgtggaaggtctaattctgtggcttgaggacatctgcagtagggccagatgtcagagcaggtagtggtcatgcttcatgaagtttttaggagggcacagttacctggttgatgcaaatggaagtaactggaataaatgctattgttgcaggcccaagctcccagtccatcctggctggtcatagttgactaattcatggtggtcaaaaagtgattctcttgtctttgaattttctcttgtattttaggcaaaacagatttgttttttgatactttcataaagctgtctatccatattctgttgtcacttttcaaaatgatcagaaacctaaagaactaccatacttgcctaaaagaagacacttcctgatgcatagcttgaaacaggaattgacttcctaaaggaaagtatttggcacaccaagcctattgttcacagcgctgcaagagaggcatttcaacatacatgggctcttcctaaaaatataacttgctaaaataaaaaattcagggttcattaaggttaatcatctaataaagtaagagaatttcctctaggtgaaaagtttcagtttattttaggggtgtggtgttgttacaactggctaatctccgcaccataatttaatcaggctggatgagaaagagactagaaaggcgtggagccagagcacagtgtagcttctcttcttttcccaggcttatttttttcctctaacatgtaataaatttactcgtaacaacctggcttttattgtgtcattttctagctaactgggagttactgatgtcagttgtcttttagaataacttttccttaaacatttgaagatcgtaagaattggggaactcattcattcatttattcatggagcatttactgctcacctactgtgtgctataggaacatgaagacaagcaaagcactgccctggccctcaacctggtaggggagatgtgtgaatagggccaaaaccacttaaacaagacagtggctataaaggtgtctgtaccagcgagaaggtcagctgccttccttgaagttgagtggccaaaaccactttcaggattgcaggtgggactatgttttggaggcttgatggatttttcagttatttagttcattctttcaaggaatagttattgagagcctcctgggagctgggcagtgttctaggctctggggccactgcagtgagctccagtactaaatccctgccttcatggagcaaagcaggagatcagacagcaaggagagaaatcagtgcaataccagcagacttgaagtagggaaaggaacaaccatgactctgggcacaggggacagtgaggaggccagtgaggtgggagtgagggaaagggggctaagggtaaggccagagaaggaatgtggaagaaggtcctggagggacttgggggctttcttttcctagaacatgctcctaatagccagcccccagacatctgatggcctgttgagctattacaacattttaggttgatgtcttcattttcattcatgtttttccttttattgtccctgatgctgaaaaacaagaggttgagtttgtgagacaaaatgtcttcattgtgtgtgtgatggggataggcatagtctccccatcttgttctgtgctgtctgccgttaaggaggtggggagattacgatcactctcctttcctgtacagtaatctgctgatctctggaacatactaaggaggacatagagtgacaacatctataatccccttaatctctatattcatactgtctaatctccttgagttacactggtaacataagtctatctcttagagttacttttatcattaacagcacaaaaatgtattatttacagggccaaatgcaagctcttgaggcatataaagtggattaataaggttggctcagcgttaagctatgccagagccgagtccaaattttattccggtacagggatgactttctatgtggcctctctggctctggagctaatttggatgctgagtagccccgcaggtatttatatgtagcgtttggtatttttactgggtcctattcttctcccttggatcacctaaaatggttaagaattttctagtgggattaaggttgtgatctctggggaggggtgggacatctgctctcggttatttttgtgttagccgcttccccttaaatgtatgttcacaaatgagccacagccttatcagctggggttgagggaagactggtctaggtgctgctcctgaacttggtctctgagccatggcttcccatagacactcaggtaaaacttcatgctctttatcttatattgagcacagttttgttagggcagtgaatccgtcattgggctaaaagatggtttttgatgaaatgattttagtcttgtctgaatagtaaataaattatagcttgtctctgttttgcctttgcctttcatgctatttcaaagacaaaatattgttcaagtacaatgaacagtttgagtgatttattttaaaaagaagtatataaacatgttaccactatatttttacctttttcaggacatctcatgaaactataagagattgtgggaggaaaggtttttctggttaggaatttttggctttcttttttataagatacaattcttcatcttgacagtgctttacatccaaggtgtttggagaaggtaaatcgaatgtggagctgaaaggaggaacatttgtaactaagaaagtccataatgacctagcacatcttcccttttgctgacaatgttttaaatcttcccgaagtaacagctatgttccttttgatatgctaagtatgttattaattgtttttagcagaaaaaggggcacattttggactccttgggacatgagcattttcttctggttttgtaaccttacaattaaggaagccctttggccatcgacaagaaatctatgaactaggggctgaggggccaaaagcccagttatttgaagccaggagggtggctgtggccctgtggccctctgcctaagtaacggttccctttcttggggctggtaaagtcagacggttagatataaagaaggcacttcatcctgtctcccagctttcagattaagggatgtcattatctatgtttttttttttttttgaaaaatcattttttaaaactcattgcctgtcaatatttaaacaatggaaatactttaggaaatttctctttttggggttttaaatatgctgcaatggaatgccctaccttaatgaattaatatgtaatgtcttccctgttcccaagtgttcaaaagttgtctggtttttttttttttccaaccctcaggagctgtttcacaaacatggtaccaaatgcttgagattgtggttatcagccaagatacacattctctgggtgtaggcaaactagtcagctgtgctagttgtcctgatgaaccttaaatgcatgttacctggtagaataactctcattttgtttactaattaagtgacagaatagtgacagaaagtttaaaagtttaaatagtgacagaaagtttatagcatacccaaccttgggttttaaattgcaccaaattcttatgtcgttcttgtgtatgtaagtctggaggctctaataactgtggctaaatgggaccaattatttataccttttagatgatttttgaattcaggaaattgcattttgtattgcattaggttaatagattcatgaaagcagagaagaatcagtccatgagacagagaagtcctcatagaaaatcagtgttgccctgaaacgggctcagtatgggcaaaatagaagctaggataattggatccaaatccatttttagtgactatccatatactgagaggacatttcaaggacaaaaacaatgtatactcttgacattgaagactttctgtctgcaaaattatgtagattcaatttctttagcctttggcctttcaagtcgaaaaccaggtttggggtgtggagggggatcaggtcacttgccatattacacagccatcgattcccttcaccagctgctgctcagtgggccgcacaagcccgccagtcttttctcagggcagggatggaaaatgagagggtaggatgagaggaaagtaatccaactggattggcttcttaaaatacagaagatttgagtgagagtgaaactgaacattttgtgcttttgatgaccaccaaatgactacctactacttcaccacagctggagaaactaaaaacacatgctcttttgctgccgggtcagaaatgctttttttcccatatgaaagaggggctgtgttgcacgtaatctgtgcaacattatgaaaaatcttcatatacagacaaaatggtactagaattgaatctggactgcaggaagttcagtggcacataatttttcttttaataatctatatcgaaccctcctgacacccgatataatctaaaatggcattagttatacatcagtgacccaaaaaagatttgttttttttctaaatgcagcataccagtgaagttgctaattacattgaatcattctgtacacgttctattttgaagggaaaaaacactttctgatttttgtatgaaattgtatgaaagactacttttcagccgtgactcatgagctccgtctcattgcagctacttaggtatttattcccaaatgtctgacgacacctccaggtgcattagcatgtctattacacaagtgtcctattcattggctaaggctttgctccatctgttgaatgttctgaggaaagcattataccctttctttagaagccagtgtttatatgtggagtcactaatgtactggtaggttggatttagtgaagaacagatctgaaataacctgatttttttccatttgggttgttgttcattgtttacactgtacattacacccttcatggaaaacacatagaaaaatgctacctactcatgatattcacattctccttaaatattcatagtttgagcaactcaggcatgagggagaagatgaacaataggaagaaatacatgagaaaatacatgtaaaaacacaagcaagatttattaaatacaaatcgactgtaatgagaggtttatagtaaaaaagaaaaaagaaaaaaacaaatgttgtaatgttatattacttgtatgtgtacatgattaaattgaaagccaaaacttttaattaagatactgaggtttatttaggcacctctcagcatgttggatgtagttcaagaattttctgaaaaaggaagcttgtttattaagtgaaaatgatgtgtcttttgaagcaggcatagaaagtcaggctacccttttggaataaatgtctaaaattttatcacccagccacatttctaactgtattctaagcttgtaaaactttaatttagttaatttttaattaaattatttaataatgatgctttctgtcttagaaaatcaggggacatttatgtggacctaaggtgtaggttagacttcagcaccttacacgtcatataagatgatttttaaaatcaggaaatagtatgtcatattgcattaggttcataagtccatgaaagcagaggagaataggcccaagaaagaagtccttacagaaaggaaatcagtgtggtcctgaaatagggttggtatggacaaaatagaggctcagataattggatcagaagccactttcagtgactatccacataccaaagttttagaaacttagttgtggtaacatatctccatctgtcaatcaacaggcatatactgagtgattcctgtatacaaagccctggattaggtactggggccccctagtgtatgagcagaactttctgtcatagagaaaccccacttgttagcactagggaatgtatccaagtcactcggcaccaaagtatgttagcagcggggaatctgtgggtctgtagcaacctcatttcttgcctcctcaaggaagaacaaggcagagggagaagccaaggcaacttttagagcaggagtgaaagtttattaaaaacttttagagcaggaggccgggcacggtggctcatgcctgtaatgccagcactttgggaggctgaggcgggtggattacttgaggtcaggagttggagaccagcctggtcaacatgctgaaactctgtctctactaaaaatacaaaaattagccaggcttggtggtgcacgcatgtaatcccagctacttgggaggctgaggcaggagaattgcttgaacctgggaggcggaagttacagtgaacagagattgcaccattgcactgcagcctgggtgacaaagtgagactccgtctcaaaaaataaaataaagtttcagagcaggaatgaaagtaaagtacatttagaagatgaccaagcaggctacttgagagattcaaaaagtgcatggtttgacctttgacctgggcttttatatgttggcatgattcgggtgttatattacttctctcctgattcttcccttggggtgggctgtccgcatgcccagtggcctgccagcacttgggaagtgccgcatgcgtggtgtttactgaagttgtgtgcatgcttactttaagcgatttttcccttagcagtagagcattcccagaggtaggtcttataccagttaaacaccgcaattttgcctcttagtgcacatgcttgagcccaattacccacctcctgagatctcatggggacgtggctgagcatcagtttcaggtgtttctgtctattagggaccgtgtttccttggtgccagctgcaaccaattattattttagcgagagatagtttaacaaccatctgaccttcacctgatggccgcctgacattcctggttgggtggggggccctctcttgccctgctcatgtctaatacctactctggcatccctactatgtacagatgagggctacaccgagacattaaaattagtcaaagagctgcccgagggcaaacatgccctccacaaagacaagtggtaagggaagaagcatggtgatgatgtgtagcaattgtttccttcaatgatggctgacactcccattcccggataacagcaataggtcaaggcagacatatctagaagttctggaagattaaaggccttcacatttcatgtacttagaaatagctaaggggataaaaaattattccctaagaaataaatgcctaagtacatgtaattctgtaaggttgaagagagcccaaaagaagaggtaaaatgctggctgggcatggtggctcatgcctgcaatcccatcaagttgggaggccgaggtgggcagatcacttgaggtcaggagttcaagaccagcctgcccgacatggcgaaaccccgtctctactaaaaatacaaaaattagccaggcgtggtggcattcacctatagtcctagctactcaggaggctaaggtaggagaattgcttgaacccaggaggtggaggttgcagtgagccaggatagcaccactgcacttcagcctgggtgacagagcgagaccctgtctcaacaacaacaaagaggtaaaatgctatcttcatttttccctattctctcatttcaaacaaaagaaagtgcaagctgggatggacgcggtggctcatgcctgtaacccctgtaatctcaggtgcggtggctcacgcctgtaaaatgcactttgggaggccaaggcaggtggatcatgaggtcaggagatcgagaccatcctggccaacatggtgaaaccctgtctctactaaaaatacaaaaattagctgggtgtggtgtcacatgcctgtagttccagctactcgggaggctgaggcaggagaatcacttgaacccaggaggcagaggttacagtgatccaagattgcgccactgcactccagcctggtgacagagcgagactccgtctaaaataaaaaagaaagaaagaaagagcaagcttttctctcctcatgaagtcaaagcttgatagtagctcagactcagggagcccacactcaggatctttgcatgtgtgtctcagcattgtcatttataagctggctttttagagttgttttggtcttgtgcacatcagcacatcattcatattttatacaaaattgtgacgtgatcagtatctcctccaacttcatcctgagcacactgcgtgcatgagggtttgaaattgttttgtaacaaataatcataaatttagaagtacgtgacgtaagctaattcaggttgcccagagttccacttaatttgatttattgcaaaacaaatacgaaagttcatgaatttgacatagacattgttaacatactttaagtatttctagcctgtttacttattatgcaacaaatccaacattcctagaagtgcctattttatctagactaattgtttccacacacattaaaaggactcaagtgaattgtagaaatgtattctaaaagaatatgccctttgaaatgattctccatctggatacagactgcaggtttaagtatagagtggtggggaatctaaggtgtaaggtgaccctagagttttcaaactcagagtgaaaaaatcttgcctaaagctaggattcaaaaataccaagagatgaaactcttcttatgggtactattaacttggggttgattcatttaattttccttttgcttggtttaagaccatgtactataggaatgatacagtggccagtgacttcattgtctgacattttcaacaccctttgttacttctatcttcactggtgagctgtggattattttatcatctggatgcttagaactctgagcaagtcatgttctagaactatgagactaaacaatgaagaactttgcactggtaatatcaaagtactgaaagtgtgtggttttaaagtgtgaaaaacatggcagttaagatctctcaggtactttgaaccataatgcagttttccttctcttcaaaacctctacttctaaatggcattcattgtgttttctagtgttttttctttggtatgacactagttaacctgtatttcttaccataaagctaggactcaaatactaagaggtttgactcaccttaggtggaactttatatagtactttaacttagaaatatttggaatcaatttctgcttataaaggtatcaaaagcaagtgatactaaaacgagtaggttcaaagttgtatactaaatagagaccttggtaagagagaatgagggattttcaaatatggtccagaagatagtctctgaaaggctaaaccagcaatggttactagccatgcaggaagccagtgctgtctaatcttacaaattctgttttcctgccaaatggcatttaggagcaactgataatttatttcttgccacttgccgttactggagatttatttggtttctcaactcagcccttaacaagaaagcaagtctttgttgagggcacaatattatcagtatggcaaagctaagacgaggcttctgtgtgacactggaaagaccaacaagaatggattaaagagagtgattttccatatgctgtcactgggacaggtacttttctctgtagacacacaggctaaaagcagtttaaaagcttccttacctaaacagtacatagttcaaggagataggccctgtgtccattgcgtctctagtttttgtttctaacccattatataaagaaacatcccagtttgctttttagagaaaagttcaagttagaaccattctctggtcttgctaagtctcttaattgtgacacaactgtcctaagcaactgtccttgcacaagaatgtcactcatctgcttcatctgccagctccttagagatgaggggggtctgtgtgtcagcaggaggcagaaggccctgtggctcatccagtggcctgatttcctttgtttggaggcttggttctgagtgagagttcaacagcctttgcccaggcggcttctcaaacacagggtgtggtttccttagctcactctctgctgtttggttgctcatggcaacaagatccaaataacttggacatgtgtttgtataaaaaaaacctgggaatggaacccaaagtgagactttggggctttcagttagtggaagagctgcggtgagtaccaggcaactgctcatttattttctctcattctttctctctaaattacgctggaagtttgctagcacaataaccatgtttgtggatagttttagaaagtagtctcaattcttgtatttcctgcacaaatgaaataattgctatctatttacccgtgcaaatttctttttcgggggagaggaacaaattagcatatgtttaaagaagttgaaagctaatagaaactcatatttggtaccttttgggtggcaggattctataggaaatgccttggcaaagggagctgcagagtgccttagtaatgcttgggattgcaggcgtgttgtctagggccacagccggggaggggaccagggagggaagaggggttgttcatacggagggagtggaagggattcttggaataattttttccagactctattttaagattataatttttaagacagcaaatatcccaaatggtaatactggttacacttctatgagcatattgattctcacttgcttgactcaagggagggtttgattttggtcacaaagccacccgtgactatgacagataattcaaggttgccaaacttgcctgtgccaattgacaaagccatttatataagtcctctcttgctatattgctctggcctcaaaaggcagtaaactctcttggacaaaactctttaggatctattcagggatttaacacttttctgctaaattgcaagtaaatttaaacattttaaacaaattaacaaggattgcttaggtacctggtgtggtacagaatgagctgtcagtttctattctgatgaatagaattttatagataggaggaacgggaggcctccagaggatactaccctccctaaaaagagacggaggaagagctgaaagcgggcagagaggcttcttgatgacaacgtggtgggcttagagaagctgctgcctgcaggcggggcccctgctttcctgcacccctttgagcctctgccccacactcttcctttgtataaaacaactgcttcttgcctgcctgccccatcacacccctccactccatcgggtcactgctcaatggcacaatagcactgctcagccatacctcccagcatcctgtcccctatctggtgacttggccaacacaggctctgatccacttgccccgctccgcatcttttgtgaatcagcacagttgatatatctgagcaggggcttctaccatctccccagggaatcactagccatcggccatctggccccgcggggtgcttttgttcctggaatcatagtgaagtatctgttgtcttggtgcctggtagtcagctcggctgaaggggaagctgggtcttggtcctcagaccccatggactccaaggcagcattgtgcaggtgcctctgggagccactgctcagggtgctggggcatttcctgtggtcatttgtcctgtctgcttgcccccgcaggtccctccagctacaaggtgggcaccatggcggagaagtttgactgccactactgcagggatcccttgcaggggaagaagtatgtgcaaaaggatggccaccactgctgcctgaaatgctttgacaagttctgtgccaacacctgtgtggaatgccgcaagcccatcggtgcggactccaaggtaacgggcatccccatgtgccaatgggaagggctgggttttggagtgtcctttgcccacaaccatggcagcagcagctggctgttaggatttcccagcatcactgcagccaccttgaggcctcaaggaagcctcctccactccccaggccacagtggcccgagctgtttaatgtggggcttgactggatgggcgccagcgcccttgccagctcttttgattgcattctaaatatttcaagaattgtgagatttttatcctcacctcagcgtccctcctataagaatagtcactgtggggcagtcccaggtgtaagggactgtgtcatctcagtggtcagtcccagggaaatcagccttatgggagggctcctgccaccacccccagcacccctcatggtggcccaccctgtctgcttggtttccaggaggtgcactataagaaccgcttctggcatgacacctgcttccgctgtgccaagtgccttcaccccttggccaatgagacctttgtggccaaggacaacaagatcctgtgcaacaagtgcaccactcgggaggactcccccaagtgcaaggggtgcttcaaggccattgtggcaggtactgcctccttcccaccccgggttcccagggaggaggccctgagggcagacgtgatgtgggcttgcttatcatggtggggctaacgttgctctgagctgctttgagatcttagcatatatatgtacacatatacatacacgtatatatgcgtacacatatatgctcgcacacacgcacacactcggagactaaagaacactggcgagaacagcctgtggcaacagaatgaagtgaacagtatgtagcgctttctcatttgggcgtagtaagtgatgaaagcatgcttcttcctcagggtgtcattctgggccaggcagtccctgatttaatgtctaagtgcacgcagggtatagaggtgggggagtgggggattcaggcactggatcctaaaataataatgctggggtccccacccatgacagaaatcctgggttggcacaagcacaagtagaacacaggtaggttagttggaggtgtgaggccagtaactgcagggcctgcatcccctcacctctggagggcctggggaggggagctgagtggatgcagccccctgcagagcctgtcagtggggctatccaattgcttccctctgcaggagatcaaaacgtggagtacaaggggaccgtctggcacaaagactgcttcacctgtagtaactgcaagcaagtcatcgggactggaagcttcttccctaaaggggaggacttctactgcgtgacttgccatgagaccaagtttgccaagcattgcgtgaagtgcaacaaggtatgctttcaagggagttctgcattgaccgttgtttctagaagtgtttgacagtttgcagagcacttccacacacactatcccattccatcctcacgacagccctgtgacgtaggaattattattcccgttttacagatgaggagatcgtggattaggaagcagtgccacagccaagtcaggctgtcagtacgcatcctcagcctggtggtgcgggtggcccgtatggcatgctgagctgggcagccctggctctagaagcctgcctccaccacttaggggctgtgtaacctcacataggggctcaccttctccgagccttggtgtcttcatctgtaaagtggggataataatagcccctgcctcccatggctgttgtggagattaaatgagatattgtataccaaagcgcccagcacagtgcctggcacgcagtaggcattcaacaaaatggttgttgaatctgaatccggtgctacactccctggtctaggccatcacatctggaggaatcacttaccaggatcagccctggcatgccgattgctttgtgtgtgttacctgctctaagaagctggctgggcagcgtttcaccgctgtggaggaccagtattactgcgtggattgctacaagaactttgtggccaagaagtgtgctggatgcaagaaccccatcactggtaggctaaagagtccttgctaagtctgccaggctaggttttgcgcatggtaaccatctctcattttcctgtcgtcggtttcatccacaaaggcccccagagaatgcccttctccccctgctattgtggtcccaaaggccccccaagagtttggattcgtccccaggccaggttagcctttgcaatacagaacacttcctgactgttgactaacaatgctgagagttcacaagcctgagacctgccagccaacaccggcaggcactgccactttgcagggggattctggggggaggggtgggaggagggtagaaagaagggggtgggggagggtggggaaggggtaagggaggccgaagagtgataacccgggattgtaataccccatagctgaaggctagttcagagatgcctgttggcagggtttcttttttttttggtttgctgtttatttgtttttgcgatcagcaaagctaatcacttcattcctcatctcgcggccgcgatccacgtgccctgggccctttcccttgcctccaattttcccatcttcccggggagccttgaaatgtacatttgagaagacttttgccatcctcagggaaaaggactgtgtcaagagtgagccacccagtctctaaagctaggaagcccccagtgtgccacgggaaacgcttgcctctcaccctgtttcccagcgccaacctccggggcaggcatccgggtggagagaggacttgtccctcgtgggtggtggttctttatagaaaaaatcgaagcttagcagctcctcgaggcccggtaagtgcacaccccacgaacagcccaagtttgcctcctggtggccactttgatgtcatggccctgacctaaatcaaagaaactggttatgctgggaggtcggtgcgcgtcacagggcaatagcgtggtggcatgggaacgtggggtctttacatcagggaagcccttggccgggcttcagcatcttctcaggtccttgagagccacagcagggttgcggcggcatgggggacaatggcggcgtgggggactgtgcacgatggagtggaggagggggtctgggagccaggcagacctggctcttgcgtgcttgtcggtctgtgagtggggcaggtcgtcattttatctctctgaatcgtggtttcctcacctgtattcattcagctgtttctcttgttttcttttcttttctttttttttccccccagggtttggtaaaggctccagtgtggtggcctatgaaggacaatcctggcacgactactgcttccactgcaaaaaatgctccgtgaatctggccaacaagcgctttgttttccaccaggagcaagtgtattgtcccgactgtgccaaaaagctgtaaactgacaggggctcctgtcctgtaaaatggcatttgaatctcgttctttgtgtccttactttctgccctataccatcaataggggaagagtggtccttcccttctttaaagttctccttccgtcttttctcccattttacagtattactcaaataagggcacacagtgatcatattagcatttagcaaaaagcaaccctgcagcaaagtgaatttctgtccggctgcaatttaaaaatgaaaacttaggtagattgactcttctgcatgtttctcatagagcagaaaagtgctaatcatttagccacttagtgatgtaagcaagaagcataggagataaaacccccactgagatgcctctcatgcctcagctgggacccaccgtgtagacacacgacatgcaagagttgcagcggctgctccaactcactgctcaccctcttctgtgagcaggaaaagaaccctactgacatgcatggtttaacttcctcatcagaactctgcccttccttctgttcttttgtgctttcaaataactaacacgaacttccagaaaattaacatttgaacttagctgtaattctaaactgacctttccccgtactaacgtttggtttccccgtgtggcatgttttctgagcgttcctactttaaagcatggaacatgcaggtgatttgggaagtgtagaaagacctgagaaaacgagcctgtttcagaggaacatcgtcacaacgaatacttctggaagcttaacaaaactaaccctgctgtcctttttattgtttttaattaatatttttgttttaattgatagcaaaatagtttatgggtttggaaacttgcatgaaaatattttagccccctcagatgttcctgcagtgctgaaattcatcctacggaagtaaccgcaaaactctagagggggagttgagcaggcgccagggctgtcatcaacatggatatgacatttcacaacagtgactagttgaatcccttgtaacgtagtagttgtctgctctttgtccatgtgttaatgaggactgcaaagtcccttctgttgtgattcctaggacttttcctcaagaggaaatctggatttccacctaccgcttacctgaaatgcaggatcacctacttactgtattctacattattatatgacatagtataatgagacaatatcaaaagtaaacatgtaatgacaatacatactaacattcttgtaggagtggttagagaagctgatgcctcatttctacattctgtcattagctattatcatctaacgtttcagtgtatccttacagaaataaagcagcatatgaataacctgc

SEQ ID NO: 114 - DNA, 2767 bp, Homo sapiens
ggagagagagaaagaaagagagagggagagagagagacagagagagttagaggaaagaagagagagcgagcacgaggaaggggggcgggggagagaagcagggggagagcggggcgagaaagaggtcggaggggagaggagggggagagacgactcagaaagtggaatctgtaaaagcaagctagaggagaagaaggaaaaccctgaatcgttataactacaccccagatgcaacgcaagcaacgacttcgtcacactaaaacggattttgtgagggccaaaagtataaattacgaagcagaaatgattatcaaacaacttccagcggtttgcacctaaagaaacacaaggagaacccactacaaacaaacaaacccagtccaaacaacgcctccagtaggaaaagaggaaaactgcgataacacgaccccccgagaagagacgagaccaacacgctgagactgtggggcgtcagcaaacctccaagtgcacggcggactgagttgtacttcgcagctctctggacattaattacctcctgcaccttccatttgggggagggtgaggaagaaggcactcacctacactgagcgaagaagtcctatcagcgtggaagagaagtttaagaatgaaccactgaatgtttcgcttttatttttaaatttactttggcacttaaaaaacctcatttccagatttctggacaatctcggctgcagacatctaagcctaaccttttggtatcctgagttttttccctctccttctccttcctcacgcccaccccgcttctctcgcacacggtcatctttacatatcaagagaaagcaaaaaggttccaagaggtacttttctttttagaaaatcaccttttctcccctaattcttctgcagaagaaaagaggtttcgaaagagggaaaaggaaaaaacaagccggctacggtatcagccggtcagcccaggtggaaaacgagagtgaaagtagggcttaacggggagcgcaccgcctctttcgaaagccgctgggccaccaccagtgcgtgagccttggatccctcaacgtattgcgagacgccggtgtatagcccggacctgtgccccaacatgatcgccgctcaggccaagctggtttaccagctcaataagtactacactgagcgctgtcaggcgcgcaaggcggccatcgccaaaaccatccgagaggtctgtaaggtggtctcggacgtgctcaaggaagtggaggtgcaggagcctcgcttcatcagctccttgagcgagatcgatgcccgctacgaggggctcgaggtcatttcgcccaccgaatttgaggtggtgctctacctaaaccagatgggcgtcttcaacttcgtggacgacggctcgctgcccggctgcgcagtgctcaaactgagcgatgggcggaagcggagcatgtctctctgggtcgagttcatcacggcgtcgggctatctctcagcgcgtaagatccgctcgcgtttccagacgctggtggcccaggcggtggacaagtgcagctatcgggatgtggtcaagatgatcgcggacaccagcgaggtcaagttgcgcatcagggagcgctatgtggtgcaaatcactccggcgttcaagtgcaccgggatctggcctcgcagcgcggcacagtggcctatgccccacatcccttggcccggccccaatcgggtggccgaggtcaaggccgaagggttcaacttgctctcgaaggagtgctactcgctgaccggcaagcagagctcggcagagagcgacgcctgggtgctacagttcggggaggcggagaaccgcctgctgatgggcggctgccgaaacaagtgcctctcagtgctgaagactctgcgggaccgccacctggagctacccggccagccgctcaacaactaccacatgaagacgctgctgctgtacgagtgcgagaaacacccacgagaaacggactgggacgagtcgtgcctgggcgaccggctcaacggcatcctgctgcagctcatctcctgcctgcagtgccgccgctgccctcactactttctgcccaacctcgacctctttcagggcaagccccattcggccctggagagcgctgccaagcagacctggaggttggccagggaaattctcaccaatcccaaaagcctggacaaactatagggtgctggggactgcttgaaaagcgacacaaacgggcgtgctctctcagacacacaactctgctataaacagcagaaactctggacacaaacttttatgtaagtcacctgaaataggaatccggcagaagaccttcattaattaagaagcaaacaaaaagagagcaacccaaccaaaacaaatcacattcttgcacaaaagtgatcgttttcttccaaacaatgtgaatttaaaaggtcacacaaaagaagcaatcgggctccgccaccacaaaatgaaacccaaggtacattttcaaatcaatgtatagtagttccccccccttttccttctttccccctatcctttttctctccaccccatccccccccccatttcgttttgcttttggttgcctgaatgttgtcaccaagtgaaaaaattatttaactatatgtaaaatttctcttttaaaaaaaagttttactgatgttaaacgttctcagtgccaatgtcagactgtgctcctccctctcctgaacctctaccctcaccctgagctgtcttgttgaaaacagtaataaaaacattactttacattgt

SEQ ID NO: 115 - DNA, 177300 bp, Homo sapiens
actctgcttgaacctccttaagggtattttaacttctcactctgcttgaacctccgtccttcgggacgcaaggattcagggagcttcctttcctggctgcgagggatcttcctgagcagagctctccgggttccccggctcgcggggcccggcgaagggcaggtgggtgcggccgtgcgggtgctgggggtgcggcgccccaaggggcgccacctcgtgcggcaggagggtcgcggcggcggcgcccgccttctcgggagggggcgacaacaccgaggacaggcaggggaacgcggcggcggcggcggcagcggcggcggcggctgccgcggctgccgccggggcggggatgccggggtatagcagcgggaacggggcggcagccgccgccgggtacagatacttctccaggccgctcttgtccaggaagggctgcacgtaggcggcagctgcagaaggcgagaggaagcagaagggcaggcagaagggggccgcggcggccgcgggctgcgggaagggcgcgcctccgcctccgccgaacgccaccagcgagctgagcagggcggcgtcgggtctcagcagcgcggccgcggcggcagggtcgggccccagaagcgcggctgccgccgccgccgcgccgccccccgggccgccgccgctgccgccgccgcgggaatccagcttcatcctcttgggcgccggcgagtcctccccgggaggctcctgcttgatggtgacgcggctcgcccccgcgcctttgcctttctcgcggtccggccgggcctcggcttcgccgccgtagccgctgtcggtgtccgtgtcgttctcggcggcgagctcggcgctgggctgagtccgctggatgacgggcacgcagtaggcgaggggctccagcttctgccccgcgcgctccaggcagggggcggccgcggacccggcggccgagggagcgccggtgcctttgctcagagggacctgttgagtcaacagctgcggggtgggcaagaactgggtggccacggcgtgcaagtggttgatcagctggacacaccgcggctccctgggtgtccagctctcaaaccgggagaggtattgcaagacttctttggcgcatgtttgaaatcccgagtggaacgcatccaagtcggactgaatgggcgatttcagagatcgctcccctaggatgaggaagggatgggggtgggggacggaggagtggaggcaagaagaaacatacccacgttaaaacatctgcttatcacgtgggccctgcatcgactaaagtgatctcggtttttccccagtattcaagtgatataatccaccagttgacgagagaagcggggtggcggaggtgcggagcggggagagggcgctctcctcccagctgaaaaccaaagtggagcgggtgcaaccgccactttaaatcctgattcctccgagttctgctgaaagcctctaggatgcttcgggaaatgggctcgttccaatgaagggaaagtataagcaatttaacaaatgagagggaacccatgagcccacggaaagagatggggtgcgggtgagggagtcctgacactgctcccctgtgggctgccccgcttcatcagggtaggctggcctccctgaactgacttaccattctgtaaagcaattatcttctgatgctgttgctcggttaaggcggttaaagcttttaagtgtttcaaagttaattccaagactacagctttctccagatgtcccagagtctgcagtggtgcaaaaaagaaacgggcacttggttacttaaaaacacacatttggcttaattggctgtccattcagcacagcaatttaagcaaacactttgaaagaagtactgttcttttacttcttgagctttccacaagacaggttataaatgatttcttgccttcagctgggagcacctactccagtttgcgggaaactctgtacggtatagcacaagttttaagtcaggaacttatatttacatttattcttatattttctgggagtcgcaccagactattaacacgcccttggagagcagcaaagaatgaaaatgtgcatcttactgtcaatttcagatgttcaggcagtaaatctttcagctgagcaatgcattcattaattcggtctcttcttttcttttctattaatctgtgcggtaatttgtaggtatccttaatatatgagagtcatggaaaagagaaaacagtaagcgaaacattcacttattggatattaccctcgtctgccccccccgcccccccaccataaaacatactatgtgataaactacacccaagaaacctctttcctctggactgttctgcaatgcaatttaaattcaggtatgatgtttaatatccccctgagagtacccagcaagccacttaaaattcacagttggggaagctcaggggctggaatatatttgcgggcagagcttcactgtgaaatcaatggctctaattaactacccatgcaggttatgaggaatatcgggaacttacacttaccttggtgtcgtctcgtttcatgctccttttgggtttacacatatacaaagaggaatagtccagtctgcaaaacagaaatcagcatcaggcacccattcggggaggggctctgccctcgccagctccataccactttctggagaagaaaaaaatcaaaccaaagcctagacagatattcgcaagggtgcgtgcaccttaccctataaaatctctatgttccagtaactgtctctcttgcaaatgaggaattccttcgtccatgttcaactgctgttcgtttcctctgtttcgatttttggggctctgtacaataatctgtgggacggtaggcttgggagaccttggggggatctgtgcgtctccagtctctctctcgctctccctcttcagtgcagtgttgaaagtgtgaagcagttggtcccccccctccaccgcgctcgcacacacacacgcacacacacgcacactcgcgccggccccactgcgctggtagtttgctctcactccaggcagtgtttggccacagggcacgcgcgtcgccggccagaccagcacccagctcacgtgcggaacgtaccatccgcggtccagcccggaggggggcgggggaggaggggccgggccgggcgggggcgtcgggagaaggcggcgagagaaggcgaacggcaggagggggcggggacacctgatcagggccaccggaaaggaaaaacaacttcggccaagctattcatcttcccaaaggcgatgcagtcggcaggaggaggggggagtgggggtgcaggggtgcggggcagcctgagcttccttggctccaaaatgcgactccctgggttcgtccgttgttacggtgcaggaatgtgaacgtggctttttgcttttccaccgattgtgctgttggtttgaaccatagaaaggaagtgaaaagagaattcgcggtgggtaaacttgagtcccaaaggaaattttggagacttgtttgctcactgatcagtggcctggagggactccttggcgctgggtggagaggttgcctcgagaagaagcaacttgcaatccgctccttgaaggatttaagatacatgaaaacgttgtcactgggtccgaatgtcgcaatccaagtgtctttcggtgacacggcgtccctgggccaactaaacttccccgcagcagccggaattgcggtgccactaatcacagcagcagatgacgacgtttggggccgcgtgtgctcctggaggaacgcggcggggagcgagccggggttgagtgggggctgggaagggagaagggggtggcacgagagggggtggcacgagaggggctaccacagaaaagctatgcagcatttatcacccgcccgctcaactctgccgcgttctgagcctccggtgacgctacgtgctttccccatccccccgcccccccgcgcgataagagacgcccggagtgtgcagagcccacgtttactaccgctggcacctccaaagcctccctccttaatccggtctcaaacgggtaccagcacagggccagcaacgtgatccgacctgccgctgctgccacatcactgctcggggaacccgtgcgcgcgcgcgctcgccctgcagccgcggcgctcggcgccgggaatcacaggccagcaagagccgggttacctttccccagagccaccctgggagcatgactcactgctagtgagagttaccgggaggtgcccggggatgcgcactgcccacgccgccctgccagcccaggggaaggcatgtcctgagggactcccaggggtgggatggaggctatatatatatttctctagatatacataaagacatagagaaaaaaaccaaggtttttcctgcacagagagggatatttacattctccccggggtgatctctgaaacgttgattattgccggtgataagtgaaccgaggggagaagaacgccaaaggtacatgcaccagggcgcagcagggactggggcgcccgctacgtgtcccccggcccgccccgccgggcacgggttccggggacggatctgggtcgcgggaagcggcggctgggaggaggtcacgtgtctgcgggagtcgcgtctcctccccgactccaggagcagcccgggccgcggcggccgctcgcgctgctgcagtctccggagtcctgggcggagacgcgcactgcgtctggcttcgtgactcgggcggcggcggcggcccaggatcaccccggcgtgaggagacgctcgcggtccgttcagttcatctgtttagagggccttttaaggtctctcgacttcctcaaatagaggaacgtattttgcaccaaacaggcaatttaatcacgatggttcttaatttaaaaagtatttttaaaatgctgactttattttaaatctcggtccgacctctctcctatttccaaaaggttaggtaattaagacccttcgatggggagggcacgttggagccctaaaagcgacctattcctgcagtactgtatcatttttacctctttttaattgactaaaaatgggaatgccgttaggtgaataatttaaaaattaaaacaccaggtccccttctagatttctgaatgtttggagtagaaaggggatgtaaatatttgctccagagctaaatttcacttgaaaaggatgactggttagggaaaatgaaataaagacaagatcattgcattttggcctcgtcgggctaaaaacacaaggcagacatctgaccagggcaaaccttagaagctaagtctggggcagagattaaatgcaagttgaaataggaggaacacgatcaggagccttgaggctcaaaggtgggttaaataagcttgcagcaccccataatttaaagggacaaaaagctgcaaatgacacatgaagcttttttctgttatctctttgaggctcctctctccccccatcctttctgccccaagcttccccacttccgtacccttttcccgtgatacctactcaaactgcaaatggggtcttttcccaatttttatctcctttgttgttcttgatccccttttcctcttcttttctgtctttcctttacatattcaccttttaactcatgtttccctttttcatttcttctttatcttcctttcccttatgttctctgtctaccttttccctgttaaatgccagcttttgccatttctctgtagttctgtcaatctcctgtttgctttttgcccttttttttctttgatctttcaccctggtgactcttcttggttacccacttcccttaaacttgaatcccattcctgttctttctcaaactcttggcttctggaatattgggcatagtttgatgcctctgaatatccctttgcgcaagaagggtgtaacaatagctaacaactatatagcctttaagattagagtaccagactgcattcaaagagctttttatgtattaagtcattaatcatttccacaaccctctaaggtagatactattattgtttccattctacagatgagaaaatgcttacaaagtgagattgcaaaatatttccaaggtcccagagccaggatttaagcccagacagtgggttcgagagtctggaccctggacgactcttacacctcaatgtgaatagtgagtggtaaggtataagtgttaactagctgcttcagggatgtttttctatttaccagtataagtgtgcacatttgtgtgtgtgtgtgaatgaaattgtgtggggagttttgcaagagagatggaaaagggagaggtgttagcattggagctgatgacagagataagaaaagctatggcaagaagagaggcagtcttttgccatgtcagtgagtcattcagttggcatctagcttcaaatttattgatttaaatccaaatatcctaattaactcttataattttgtacagatggacagatggaagtacagtttagaaaaggctgatggtgaccagctgttcaccagctctgctgagcaaactgagccaagctctaatgtgaagacttcaggttagtaataggaaaagttcacctgtggtgaggttagaaagggaaaaaaagtacgctaacaaaggaacagaaactagaatgccatctttggatatgttttaaaataggttgagtcttatctttttaggaaagcttaatgctatcctgctgaaagccaagaagatacaagatgagctcaaagcccctttgagcttataattaaagaattttgtgatgctttgctttcaattaaagatatccatctttctccttttaataggcgaggggtagctgcttccattgcttttctttggttaagtaaggaaatcattacctatagagacactaatgaaaggaaatacttaggccaattctcccccctgcctaaatatcctaagtcctgcactcattatattcaccctgtgactttagaaggccttatcctgtttgcaaagtcttggatttccaacagaaacagaacttgcctgaaaggattaaagtttccatggggaatagaggttttctgcctctttagggttctgcaagccctactgcccttctggagaattaactccagggtgttttaggaacccaagtgtgatccaaactaactgtacatctctgatggccccaaaatctgcttaggggcgtagagtctcctgcctgtgatactgtgaaaatggcccatctgaagggcagaagccattcttgatcacctctgttttacagagcggacaagaatctgcagacgttttacatcaaagttaagcagagtccaaaacaatctaaaaaagttttgggttgatgctaaaatcaaggcctggaggggatagcggggtgggatctggacttacaaaagcttccctaggaatttcggctcttggcatgcacacctactctcaagggagaagagttaatgttgtcaggcacaccacagaaagaagggtgcctcagagaaggatttaaggagggacggcaattccactgctactcaccagaagccagtatgactttaaaatattgatgatgttatttgctgaaagtaccggattttaaatgccagaatagaagattgggttttccagttgcatactcagcaaatgagcagaaacagcacacgtgtccccgtttaatttgtaaaggaccttaagtctttctgaagactatcaattaatgtgtctgtagccataaacatacctatgaaccatgttttacatttatgtaacactgctcaagaagtttatgcacttattagtctttgcatagcttcaaggagcagataatattgagtattagaaataaattttatttctgctgaaatcatttgtattttcatatttatgtgatgatcaaaaccattcatgcaggctgttctgcatttcacgtgtgctcaaaattcctggagttcttaacatacaaaagacaactaggagagagccaagcccaaagaccacaataggaggattccctggcccttctgcccctacgtatctgcctggtccctcatggtgcccatgtgcttctcatactgattgaggtggatccataatgagaccggaaaagtagcatgaggaggagatgacaaccccattaaggactttcacaaagtgttctctaccatttctctggagtctggactagttggatggtggaagtctgcaggaagaggggccttttaatgtctgtgtttcctttgttactgctgatgaaaattcttggaaaaatcttccaagaaaaacatgtttatgcaatgtgaagcacattcaaatataaataagatgcactaaatgtccacttctctcacccacccactatgggcttcatacggtccttacatcaattgtcagatggtgtcctcctggtgcagagagttgtcagtaacagatatttcttctgacttcaaaggtactcctactttaaaaaaacaacaacagaaaactagctaaggagggttaaatccagacttacaatcaaaactattggtataaaactttttatttaatagctaaagcgaaaaatcatatataacaattacccaacaagtactatggttctggtattaacttataatcatcattagtaaggaaactgactgaaatccaggctgtgtatattagttaaggtctgcatttcagccaaaataacagcaactgaaattaggaagttcttttttggtcacataaaagaagtctgaaggtaagcagtccaggggtaacgtgaagtggtaaaagtgccatcagtgtcccacacttctgcttttccactctccaccagcgtctatctgcaagatcaccccatggtcagaagatggctgcaggaactcctgcagggaaggatgaaagggtgcctgccaactgagcaaggtctcttaaggagcttttttttttttgcaagctccacccatctcattgtccaatcccattacaagaggttacaaatgtagttttcaaagctgaggctccacagcaatataggggttcttttagtaaaggggaagtggagactagatactgggttggcactagccatctctgcagtgatgtgactaaaaggaaatggcttgtccacgtcctcttcttttttcatcagtgagtctcttcccctctattatgccatatgagttggcagcatcattttattgtattagggtatttaattccaatttcagaaaaatgtcaatcttcctgtctgcaattgcacaaacttaactaactccttaagcacatggtccttaacgtctgtatttttaagttctaataattgtagaaatctccttagggaggaaatttaatagagtttgctcttcttcctgtagaatgcaaatttcagctgcatgttttcttggaaatgattgtctgtctttttacgtagcagacctgtcctgtggttgtcctgtccctgcagctgtgccttctgcctctggcagttggcttgaagagagcagcttccaggagaaaggcattctctgatagttccttgaatgcatctaggattttgcacttcattcacttctagccacacttatgtagcatacaattgctttagggtcagaagattgtgggagggctatgctatccagttgggttctggaataaatgagggaggaaagaagaggtaagtgagtgcagtgcaatgggagaagagggactaatttctaaggctgggattgggaggtgaatgctggaagagaatctatctttggagcattttactatggacaggtattaaggcaggtgtcttataaacaatgtccagtgctctcaattcttagaactaggcaccatcaactctaccttacagatgaacaaactcaggctcagagaccttaggtaacttgtctgttgtcatgtagtaatggcaaagccaggcaatagggacctaggtgtgctccagggtgtcactggcaagagtcttgagttttaacagttaattaccttctcccctcagcccctgagaggatctcctatccaagcatttcaccttccttggtgaagctctgcttcaggtcatgggagcccctgccagagggttgatgtttagaggagttgttgagagatgaggaagatggtaggaggggaaattcttaaccccattctagctgacttggaatttctgatgtttgaatgggaattttgcatgtatttccctacagacagacacaagggtaagggtgtggttagctcactgaataaagctgccctgtgtctagcatcttgggatctcctatccaatcctcatccactgaatgaatatttactgtgcttatatgaactgtgcactgtgatgggttttagggattcagtagtgaacgttgtcttcaataagtttacaatttaatggattaaatttctcttaagagaaaagatcactaagaaagtggaataattatcctaaagccattttatgttccaaaaaagcctgctttttggtacatttgagatacacttaaacagctctacttctctagtattgcacgttagaaatcattccagaaaatgtagtcagtggccttggtctgtgggtaaggcttgtcctgtaaaggccactagcaaagaaaatgctttctcccttgctttcctgagccatctaggccttcattatatctacctccccaatttgccctagctccctgatggtggggatgcctgttcaacacccaccccttccaagcatatacaatttcactgtatggctcctgttcggctctccaccctcccctgggattctcccacctcccttgacaagtatgatcttctcatggcttagtgtttaaactttctctctttggtgtttgaagctaactttgctctggattgtaacttggtctactccttggtgttccacatcttctgtagtgtctgttaggaagcttcttctcatccccagcccctcagccctcaccctgaccccagttgcttggtcattgccctagcaggtttcttttagggggagattaggacagggttagacttagctaatttcctttgttccagagaaggctggaatggtttcatacaagaatataactcattacaatgacccataacctccaacacatagattttcacatcctgaaaaggacaacttcctcatcatcatatacttgactccctcagctctttgacctcagcagttcaacctggaaagggacctgacagggctggcgaatttggtcagcttaatgtctacatcactttcaggtgcagggactggatggcaaatttagcaagacagcctgacctttaaacgaagaatgcggtgatcattctcaaccccttcatctccctcactcccccatccaattaataacaatatctgagaattccacctcttaaatatctgtaactccatccccctttcatcctaactgcccacactccagaccaggcccccataatctctcaccccaaatgttgcaagagcttcttccctgcttttaacagttagggtctagtaaggaagataaaaaccaccctagatatttcaagtaggaggaatttgacagaggagattaaaggcataatcataaactttggaaaggctgggattatcagttttgggaaaaactgttactgacttccagaaaatcttgacaattggttcagggaaacctgaatcccattgagctcagctgcctgccatgtggaagaggctgacttgcaggagcttgtccagaagctactgtaaacctcacatctgcacacagctgccaggggagaaatatggtgtgtctctgccactttccacatcttgcacaagggcctctcaaaggcagaatctaagttagaaagaggtggggaggggattctggaaaaatgtggttccaagtttttattatgcaatgaggacagagtggagaaggcagtggagctggtgctgagttggcatcaggtatctcacacttgtatccactgtgtatgccttctatccccctccaccacactgaattcaatcactaagttatagccagagcaatttttctgttcgtgtcattctcttgatcaaaactctttaatagcttcctatttccattaagttaaaatcaaacttgaaactcttcagtggcctgaatatgacttagttcttgcctacatctcagtctcatcactcatttctctgcccccctttctagaatccagcataccagctttctttcaaaaaatattttttaatgtaccctgctcttgctgtctcaggtccttcactcacactgttttgattgattagaatgttttgttcccacttccccaatgtctttcccttctcttcctcctactcaaccttcgggtgtcatctgaaacatcactgtctccaagaagccttctctgagttcctggaccagatttgtctccttctatcagctccctttgtgcctgtctttcataacttctgctgactgaaagactcatatgacttttcagcatctgtcttccccactagtttgtaagctccatgaagacagacacctgaattgtttactgctgtatccccagtgtctaggacagtgttgagcacagaacagacacacaactcttctgaatgattcctaaatgtgctccaccaaatcatctatacactgaagttggctttgttccaggaaaacacttgaatgacaagtcataaccaagccacataacatttgaagtgtccttgtacctgttgagggtggggaatataatgttggttcccaccctcccatcccccactaggactttcctatattggtgtggcttttatgggcagggacaccctcactatacttagagtactgcatatttacttcttggctttaccaggcacatggagattagaaagtaggtaccatgaaggatcataaaatgctcctgatattgcaggaaactcagtagtctggcagggtctttagtgaagtagtgggaagttctgtcagggggtagggcctgtggctgtggaattgctgtttgtcattgtaccaggattgatgtgctcggtgcccagaaggcagtaagctctgctccctagcagccttggtaagttgagtttctcacttgcagaacttttacttcctttcgcagtgtgcattagcaaatcagagagactgtaaaagctggagccagtccagtcgaattccacaggtgctccagagaccgtgggttggtgaggtaacatccagggcatggctctcagaggccagaagtagggaggggcgcagagtttggcctggcaagctgtgtttacaggtttgctgggctgagtggatcacaggagggggtcctggggcagagccaaagagcttggttaccaagagtgcagaaagaaacaagcactgtgccaggatgtaggagtcaagcctcagactccggaacaaagtgggaggattgagagccagtgaagccagtccatcagaatgccaagctggtaggcacagaggaggcaaggagcaaagggtcagtacagacaaaagagagctggggcaagatgcaggaggcaggaaccaggtctggaggatgcgctacgaatgtggaggaattctcctggaggtggtcagtcagtcgtgcccttgataggctggaaatagggtcagaaacacatcaaccctcaccctcaagccaactttgcatttcctcctggcactcgtacttgcaaaaacacatagctctcatttctctaattatgtattcaaaaagaaagttttgatttttctggtcaagggcttcttgcaaaatcaaactacgtttgccaaatatagccccggtgaccacaagccatcagcaggcctgggtctgagttcacacctgctcaacattcctgcattgccagtggtgatccagctgagatacaattctgagtcaattttgtcattggataatggcactactgatttttcctaggctttttattctgttttagaaattctgcttcagacataccaaaggtaatgaaatagacatatctcatatttctgtccttgtttcatattacagtccaccctccatatctgtgggctcccatccatggattcaaccaaccttaggatataaatatttgaaaataaattgtgtctgtactgaacatgtacagacattttccccttgtcattattctctaaacaatacagtttatttatatagcacttacattgtattaggtgtcataagtaatctagagatgttttaaagtgtatgggatgacgtgtgtaggctatgtgtaaaagactatgccattttatatcaggggacttgagcacccaaggattttggtatccaccggaggtcctggtaccaataccctgcagataccaagggataagtgtgtttcatgttgctgtgtatggtggcagagttggtatggacttaggctttaagatcaagaggacctgagtttaaatgctgttttcccctgagtagctgtgtgaccttggacaaattatgaatgagtcggttatctcaaatgtaactacagagaaatagcagtacctccctctgtttattgcgtgtccatgacaatgcgcagagaacacccccatcctagtaggtgagcaataaatgatagctattatttttcccatttgagctgcttggttaaaattatgagtgtcatagaaaatatgggtgtatgaaaataattgatgaattgagtaacattttaagttcaagaggtaaacctattgctttccattactctttcctctagtaatgggtgaataacaataaaacagaaggccagacctgtcaacgtgattttccattaatgagatatagttaagagtccatggtacttcgtgtgctacttggaaataggcagtactggtcacaaccttatccttttaaatcatgctatttagacagctcctctgagagctgtcacatagttccacatttatgtgcaaattgggggaaatcctgttagtccatgctttgtcgtaagttaaagccttggtcaggtcttaaatgaatgacatgggtgaattaagtttcaaactttgttagctggccatgggaggcatcttgacttatttcttctttatttcagccattctactaataaaagcaagacttttatggcagttactctgtgccatgctctcttttactgttttgcaagtcttaactcatttaattgctcaacaaccctttgatatagatagtgtgataatgccattctgaaaaggaaaaaactgcggcacaggttaagtaatttgtccatgtcacacaaatagtaaatggcagagccaggatttgaagaaaacactgcggctgcagagtcattgcccataatcttgactgcctgtgtgcacaatggcctcccaaaaacccagacaaaaattcagcatttctatttacctccatgatttttgtttagagaagcgaggcttcattatgccagaaagagcatggctttggggtctgaaactgtgagcataaggttaagctttacgaatacctgtttgcctagttgggagaggcaaagtttggaacttccctaaacctcagtgtccgcacttatagaatgaggatcttatatgcctgttgtgaggtgactagtatttctgacacatagaagatgtccaataaatatgtcactaccttgaatatatatatacacatatacatatatatgtgtgtgtgtgtgtatgtatatatatatatatatatattttttttttttttttttttttttttgagatggagtcttgctctgttgcctaggctggagtacagtggtgcaatcttggctcattgcaactgccacctcctcttttcaagcgattctcctacctcagcctcccgagtagctgggattacaggggccccaccaccacgcccggctaatttttttgtattttagtagagacgggtttcaccctgttggccaggctggtctcgaactcctgtcctcaagtgacctacccacctcagcctcccaaagtgctgggattataggcatgagtcaccgcgtctggcctactatgttgaatattaacagttgtccctcagtatccacaggggactggttccaggacctcccccgaccccatgatactaaaatctgtggatgttcaagtcccatgtaaataaagcatagcatttgcttataacctatgcacatcctcccgtatatttgaaatcatctctagattacttataatacctaatatgacataaacactatataaacactgaatttttaaatttgtattgttatttatttatttcgtttcacatatttttgatccacgattggttgaatctgtggatgtagaacctgtggatacagagggccaactgtatttaaagatatccaaatatgcaatcattttggtggtttattttctcctgaaaaacaaatttttgattttgttaaacttttcacctttccaaaatagggtaaaatttgatcactgagttaacaataatagagtatcttctatgtgcaaggcattttctagataggggctatccaacagaactttttgcagtgaaagaaatattctataatctggcctgtccaatgtggtagtgctagccgcatgtggttattgagcagttaaaattgcttagtttaactaaggtactgaattttaaattttatttaattttagttaatttacatttaattttaaatagccacatgttagtgactatcacattgcacaaggaaagtctagatgcttttattaggcccacatactgatcaatccataaataattatttttaaaaagccaagacatttttttaacctgttctttttttaaggtgcttatggtgctcagaatccgtgtgggaagaaaaaaaaatcaatgatcgagcataaattcaggccaataaagataaactatagtccattttaattttactggaactcaaatgacataacttatcaatatttttaaacagtgatcatgaatttgctatgaatattttagttacttcccataaataaatagtaatataataatttcaattctgcatatcataccatatagggattagttaggtttagatgtaagcagtagtgtgctggtaaatgtttaactggttctttatgaaaaatgtaggtgtgtgcctgtgtgcatgtgtgtgtatggtttattatatactatgttataaatgatgtgtagcaaaaacacacacttacacataagaataaaatatatattactcctgtgaatcccatatagccaactgattttcactgagtgcttttattgatttttgctaaattcttttatctcttgccaacctatgagtgcaattaattcccaagtgtaattctgacattaatgttgattgaaattttcctttatgttaatgattaaggtgaaagtcatacagtgaagacatttgttagaacctcatttattcatcattgatatgagcaatgttttcactaaatcaggtaataattttcacatactggaaaaatatttccctatttttgtgtgctattcacaatgtgataactataaatgtgacacttttaaatggaatctgcctgattaacattttctctatctcttttttgagtccaacaattggcaaaataataaatttgtagcacttgccaatttccatggtgtaaatactcccaccactactaatgtggcatcactgacagtggagttaggaaagtataatagatgtaataactaatctgaaaagcaaatagtaaaatgtggtaaatagtaagataatagtaaaatgtggtaaacagtaaaataatagtaaaatgttgtaaaatatctaggaactgatgggctttgattatttattacctttgtttttactataatttacttagtggtaaatttttataacttaattcgtcatagtgtggagtcccagaatgttggtcctgtgtttatcagcaatttctgaagcggacactctttgccagcactaggtgctagggctataaaaatgaataaggcctgtcaagatttgagttttcctggatatgctcttgccctcctctcttgtctccttttcctcactgaatgatctcatccaggctcatggcttcaatatcatctttatgctgataatcccaaatttatgtttccatctctgcttttctactgcaagctccagtctcataaattcaacttcctacctgataactccttttggatttcatgtagttatttcatgaaatatagttgtttttatgaaataactgtatgaaatcatgaccattccagcctggtacgtcgtaatgtccatgttttgctccaaacccatgtagtcttcctccagtcttcatcattctcagtcaatgacactaccatgtaccagttaattgagctctgattttaaggatcatcctttgtcctcttcttttattaattttctacattgaacctatcagcaagttctgtttcttctattccaaaatacttctcaaatctggacagtcctcaccatcttcagtgctgtcaccctagtcaaagccactatctctcattgggactattgagagagtggacctggtttggatttgtgtccccgcccaaatctcatgttgaattgtaatccccagtattggaaaaggggccgcgggggaagtgactggatcacgagggtggattttcccctcgctgttttcatgatattgggtgagttgtcatgagatctggctgtttaaaattgtgtagcaccttccccttcactctcttcctcctgctacggccatgtaggacgtgacttcttcctcttcaccttccgtcatgattgtaaatttcctgaggcctccccagccatgctgcttgtactgcctgcagaacagtgaaccaattaaaccccttttctttataaattacccagtctcaggtagttctttatagcaatgtgagtacgaatgaatacattcatatttggtcttcctgcctttcctttttcatcacacagatctttcacacaggaactcttaaaatataaagcagctcctgccacttttttgcttaaaatctctccactagttaacgtatttcagttagatcaaagtccaatctatagtaggcagaataatgggcctccataaatgtccatgtcctaatccctggaacctgtgaatatattaccttacatagcacaagaaactttgtaaatgtgactatattaaggatcttggaaaggagagattatccaggattatccaggtgggaacaatgtagtcaaaaggatgtttataagtggaagcaggaggcagaagagaattagagggagaggtaacaatggaacagccaggtagatgcagcactactgtgtttggggatggaggaagggaggtaaaatccaaggactgtgggtgcctccagagacgggaaaacgtaaggaaatggattcttccccaaagcctccaaaaaggagtgctcccttgcaaacatcttgagtttagcccaatgagaaccatgaaagacttctatctcaaagaactctcagataataaatttgtgttgtttaagctggtaaatttattgtaatttgttagcatggccacagaaaactaatacagtagcctgcaagaccctacaactttctcctctagatcctcacaaagctggttattcatcatttggattaccagaatctcctcaaaaaggcaccaccaccacctggtcactttttactctgtgctttattttctgaatagcttctgtgagaatatgaaattgtcttactaatttgtttttgtctttataccttcttaccagacacatatcattaacatatgaacttcaggaagtcaggtacctagtatatcattttcattcagtaaacgctcagtgaatgtatgttttttaaaaaatgcatgaaaacaggatgtcttgctcaggatatgcacagtctatgggagagaagatgagtaaagcaatgattacagaacagtataatgaaggctataaaagggactcatatggggagtcacaggcacccataggaaaagcaccttggcaggctctccagaggaattactattgggcacaaccttgaagagaaagtaggaaagcaaaagcctggtaaaaaggagcaggtggattttcaggcagaggttgttggaggttgtgaaagagaatacacaggtattaaatcaactgcaggtgatttggttatgctgggcctaaaatgaaagttaggaaggtgtcttatcactgggactttgtatgacttaccaagaaatgtttgatttgtctaggtggcatgaaagggttttaagcagtgccagttttgcatcgtagaaaatgtattctgatgacactgttgatagtatattgaaggggaggtaatgctggagatgggaaaccagttgggacgatatggccattttcaagatgaaaggttgtaggacagtaacagtgaaaatggagaatgatagggagatctgggaaagtattttagaggtgcgttccatgggattggtgaccaatttattgcgtgagtgagagagaaacagtattaggagttgacactcagggtttggtttgggtgactggacagagagtagtaccttcaataagaataaggaatatgggaggaggatatgagacagatttcactgtgacaagtttgtgacgtaccatgggtggaagaggcatctcagaggaagctggatttaagtctgaatcttgggaaagatcagggctagagatttatatctggaatgaatggaatatgtgatatgagtggttgagctatttcaggacatggagattagaagagaagtgggttgaggatggaatcctggggaatactgacttttacacattggatgaaagatgtgtgtctaagagtgagaccaagaaggaatagtcagagaagaaggaaagaataaagaatgtgctgtcatctacagaaatgcctggctccttcatctgtacatgcaatttagtgagatttccaatgtcacctcttccaggtcctctcaaatggattcagttgcttttcactttactgtacctgtattatgatgattgtcacattgtatatacctattttttacactggtctaattattctactcctagatagtaaacttcttgaaagcaaggactatgactcacttataattctttgtagttctcagtaggatatcatacacatattacatttatgacaaattaatatggccactgaatatagcagatattttggaaagtagcctttattcatattttaaagaaacagtagtcatttgattaagtataaagtggtaccaaacagctaagcaaaatatttctttaagatgatggtagtgtatcatcttaatatacttgatcatcataagctcctgtgtaatcataatagagaaatattaatagcgtgcttattatgttccaggtgttctgttgaatgctttatacacatgatttcatttaatattcacagtaacctatggctgggcatcattattcttatttcacagatggaagataggaatctcagagaggctaagtaacttgcgcaagattacacagtcagtaaagagctaagatttaaacccagacagcctgcctgcagagctggtgttttaagtgcctctctagggcctcttaggtgacattagggaaatcctgagctgaggcaggtaggatgcagaatgggtacttcaggggcctgtaaaatgactttgctaatttaattgccagtaatcaggtaggcattttgaacagttagaaagaaatacttgacatattggcatgtgaaacaaatagttacatttttgtgatgtaccttaaaacaggggtccctaacccccacagcaggaggtgggcggtggacatgcaagtaaagcttcatctgtatttacagctgctcccctttgcttgcattgccgcctgagctccatctcctgtcagattctcaggggagtgcaaaaccctattgtgaactgcgcatgtgagggatctaggttgtgtgctttttatgagaatctaatgcctgatgatccatcactgtctcccatcacccccacatgggaccatccagttgcaggaaaacaagctcaggtctcccactgattctatattatggtgagttgtataattatttcattctatattacaatgtaataataatagaaataaagtacacaataaatgtaatgcacttgaatcatcctgaaaccatcgccaccaccccagtctatggaaaaattgtcttccatgaaactggtctctggtgccaaaaaggttggggactgccgccttaaaacaaagacttgctgatttaaacaaatactagggtaagatcaattctttctgcaagtgatttagaatgcagaactttgccatggtttaccatagcataaaaatcaaatgctggccaccaggctgtaaggcaggaacaagtgaatcgaatggagtaaaagacccagaggagagtttggtgcctaaactaggagagttttaagatgtcttatgttactgtagccctagtaatatccatccctcctattctttcctgcttatcaacaaggtaaggcgtggttttcattccccctggcatggtaacattgtagcatgtaacatatacattctgcgtctctcttggactgtgagcctctcaagaacagagctcagtttttccatttttctgtatcaaacacagaacaagagcaggcaatgaataggatacaacttatggcaattattgcaatataaggcagatgtgagctccaagatagtaggaactttgccatttttgtttacctctgattcttcaagacagatactgagctcggtaaatatttgttgaaagaatagatggttttgtagcatgattttatattatccgacaagtagaatggattatctactaaatctttctgtttctagggtctctgattatattattcgtagtctaaattcatattaaaagttatgagttggtcactttcctccgccaatgcagtatgaactctgtttatttttaagtcaaactcttatcacatctacctttgtgtaactgaaataactcagacttcactggccagatagcattgttatattacgacttcaccccacaacaagtggcaaaaaccaaattcacattagctgaagcagtgagagatttttggtctatgtaaccagctgagggaggcaaggtgactggacctgcagatgtgaacatcattagctgtctttctttccagctctcaagtcaggttccctctgcaaacgagctttattttctcaagccagttccttcctcaagacttaactgaagtcagggatgggggcctgcagctttaaggcccatcttcaccactttgtaaccagagagaagggttgatccttccaccttcggttcaagaaaggctgggaaacgactctgcgcagctcctcttggggcacttggtcaatcactgtgtcctgggagggctggtgaggggctctgattcatccagtgtcaggaatgggcccacccttatggttgggggtgaagtgaaatgtgtgtcaatggaattggggaaaagtacagggcagacaacacagtggtgtccgctatgcctgggacattagcattggtaccctgttaggagatggcaggacgttctgtctcatacagagcctctgccactaatacttctggacatcctcaaggtgcctccaaggatccaaggctcagtcttggttttcactctcgactgtgagtcctgcagtcttggacatgggcatgcagttccgcttatgaggcaagaatggcgccaccaccatggcctcagattgggtactggtggagatgagtacaattccatgtagacagaactggtattccgccctcgtgcccctctgagtaatgcttctcttaggagctaggatggagaaggcataacaagactcctcatgccccgtaaactcatggtgcagttcactgctttggtgctacagctggctgggtcaggactttgtggacccatgtacacatgttcacccattggccacttggaggctgaaaccctgttcctgttcctatgtcgaccattgccctctcacattagctgacattgaccttttgctgtccatggagctggaagttagcctttcctgatgttggctaaatgacaacagtggtgctgtaccgtaaatccagagaagcaattgccaccctcaagagacaagtgaagagaagggtggtgcctttcaccctgcatagcaaagtggggcaggtggtggtggttcaccttctccaagtcagacctatcaagtctcctccagagtgtgcaacctgccgaggcagatggcctgagatgggatggattcatcatcactttccaagttatgtgcagatggatggttacactagatacccatgttcttaagctgatttcttggagcaccctcagtctcaccctcgttctgactcctgttgtgcccatttccatgtaagagcggtaagggacatttatgctgttaaatagtaccacctagaagtgattctttcctatcagttgatttagtcatctaattcctcaaaatacagattcacctaaactttagcattagtaggaacaataccatctccacaccacaactgggactcaacagttcagtgtttgagtgatccttcaaaccttggccttcaggcaaagacaggcagatcacttgaggccaggagttcaagaccagcctggccaacatagcaaaatccagtctctactaagaatacaaaaattagccaggtgtggtggcataggcctgtaatttcagctacttgggaggctgaagcaagagaattgcttgaaccagggaagaggaggttgcagttagccgagatgggccactgcactccagcctgggcgacagagcaaggctgtctaaaaaaaaaaaagaaagaaatcattatttcccaacaataaggtcaataagctttaaactttaagatttgattgattcaaccaaaaaagcagtatgtatattacatacttttacttataaacatacaaggctaaaatataagaataaagcttcaatgtgcagtgcaagtttatcccacaggttttaaaatgactgataacaaggattcgggtgcctgaacaaagatttcaggttggtagggtttgactctttttccaaggatgctcttcaaaacaaaagcaaattggtaaatacaggtggatgggtagaagtaagagtcttgcttaattccactttctggaaatatccatatctgagctttagctcagccaggacatcttgtaacatatataataaagcaatatgcaatgaagctaggatctgagaaaatgaaaacgataatttttggggttttttttgtgttttttttttttgagacagagtcttgctctgtagcctaggctgtagtacaatggcatgatcttggctcactgcaacctccgcctcccggttcaagtgattcccctgcctcagcctcctgagtagctgggattgcaggcacctgccatcatgcccggctaatttttgtatttttgtagagatggggttttaccatgttggccaggttggtcttgaactcctgacctcaggtgttccacccgtcttggcctcccaaagtgctgagattaccagcgtgagccaccacgcccagcccagcaataatatttacacatgaaaaaaggcatggaggtattttttgattactacttaatgcaacaccagaaatttctgtgtgagcagaaacaactatgaaagatgcagaacttttttctccccactcttcctctgcaagcctgacaatagaagacttttaagggagcaagtgcttgcttttcaattatcagcccctgtctatcgtcaagtgaatgtgtgcagagccacaggttctatgggtaggtggttaggttggtgtagtttgggggcaacagcaaggctctcaaaatacatgtgggagggggcagctgcatgtttgtacctctgcgtttgcactaatagaatcttcttgttagaaatattgtagttaagacaactttttggaattctagaatatatcttaatatttatttaatgaatttaatgcttaattttataaaacagacatggccggggatttttaagacaattggtaagcttattctatagtctggaattctgttttataaatttctgtcaagggagggactcaaataactcatctgtgtctagcaacccatgaattaacgtagggctcttattgaggacctatctgcacaggccctgctgtcttcccatcctcctgccagctgagtgccaggtcatctccatggctgcgtgcagccttacatggaggctattttggggtgactagcttcttcccgagatctgaattgggtgattggcctggagttatgttactctgaaggaaatgaagatgctgcattttgtattttagttctgggcaccgatggggaggagatcttaaatcgatttgaataaaatctagacagtgaataatcctgttgaatgctttagaactgaatttttgagataaagatgaacaaggcaggcttgtgtgatgataaagaacgggccaacatgatgtgctgctttacagagtggatgtaagtgaaaaattcaaggcttggagcaggccgtgattcctctacttaacgttttacgattttggcatcttgcattctataatattttaacccagtttcatctcgtttcaggcatggttttctaaaactatgtctatatcaggtgaaaacatgaactctaaagactgtaacatggtgcatttttctttttaaaaaagcttgctttatgatgaaattctctcagttgtgcttctaggtgacatttccattcagaaatgtcttgaaaataaatgaagatgttacgagaattacagtggacaaaatgctgcatctgacccatcctgactggctaatctagcccaattactgatctcatctgtattatcacactctcagatgtgctaggtgcctcccccaacctccccacggcacacacacaaatgcctggattttttaaaatcagaaattctctttgttctccatcacacattattcctgtttaaggttttcaacttgaaaaacttcaagccatcttggattttaaagtaatggtagatttttcttctggaacatttatcttatgtggagaagcacttactgtaaattggtgaatacagagcttactccctttacctgatgcaatagatttgatgaagtttctatattccaactcaacatcactatggctttttgcttgtgttgctgcgtttgtaaacattcaataaaagtctacttgtctataactcttgggattagaaatgcttaattccttgtatttgtatacatctaccttgtatttgtatacatctacaattccttgtatttgtatacatctaccatactggtgatttaggggcactgtgagagcaagaattatttttaaaattatcaaagaaaggtcaaattctgtccctaatgatttccatatttagctcactttatttgggggcaaaaaatcagcttcagagcagccaaatgccagacttgaagcccagcttcccctttccctagtgctcccctgtggcaagtgacttcacctttctcagcttcattctacccatctttctcttatcaataatcatatccagcttatagatttcttgtgagagttgaacaagaaataaatgtacatgtctggtgcataatttgtactcagtacctgttgcctgctatccacaacagcaatgaaaacaataataataccttggaaatagtctgcatggagcatgtgctgtaatttttgttagccaaataatgggaaaacccattactcaatcactacaccttttattatacagttaacatatgtagattagcacacatgtgcatacacacatccacacatactgcacctgaaattttttttttaattttaattttttagagcctttaagtgaaccatgatgcacctgaaatttttaaggagaggttctagaatttaaatccttttgtacatgtacacatatactcgcaaggtcaatacttcctcacatcttctgaaaggtaggaagaaacatgggcacataactttgctatatggggtactgtctcaaacttgcagatgtttctggccgactgaacaccatcctaacctagggcacccatggtttatagcttcttgttgattgtgtcaggaagtgctcaaggccaagccgacattagccacaagaaaggaagcactttggagaaagcagaaatgggtttgactccggagcagcttgggggtgctttattttgcctcccaggtctcacacatcaggctttccacaaaacctggtagcaccatcacacagctgggtattttgacactgagagcaaagttcagtaaaaggtttcgctaatgtgtatgcgatgccctcccaagtatggcatcctcacatttcagtctcttacccagttagagtttcacagactgatgctataaactggtttaattatttttttcatttaagctaatgattttattttccctggaatgactacattgtttctttgtcctgtacatacaatttatatatccttcaaaaagagctcatttacaagtatgcttttaaaacagaagccaaatgaaaagcattttaaaattttttgtgcaaatccttgtacatttttaatttggggagtcatctgcatcattataatgtattcacttactaaaaaatattttaagggaaacctttgagaccccacagttgagaatattttgtcataaaccagcataaagccaaatgctgtgagtgctagtggattttggaaggaggcataaggcttttgatttttttagccctctcttaagacctggaaagggacagtccttactgggatttgtgatgtattctgcaggaggataattttgcctctgggaaagtcagagccaggccagaatcactcctgggattttgaagtctgaagtcacttgtttggctctgctcactggagaactcaagaatgctattcatcggccagtgtgaacagtggttgagaaatgacttgctgtaacaatcatttccagaattttttgagatacagaaattcttctgcattgcttttcagacactggaatggcacattttggtgggattttcgggtggaacttagggaaaaaaaggggcaagtctatattttaatatttctatgactgttccttctctcagagaactcttgagtgccctgttagtcttttgagcaggttttcttggaaaaaaaaaattgtgctataatgccagcatgagatcagcttttgttaaaatacccaggcaaaaccaccaaacattgctaaatccttttggagaggctagagagaaactgaaggaagttacagttcattccaaaatatttagattagaactggcattatttccctatttagatctcttctcaaccataaaaaaaaaatcacatgcattgtgttatttttctcttgctgttacccagcacaactgcccccttaaaatcctcaattgggtcctaagcttttctgaggcaccctttcacatacattttttgctattgcaatgaaaaacaaatcatttattcattcaacactaaatacctagtgtgtgtcaggcactattcagagttcttgggagtaaatcagtgaacaaacagacaaagctccctgcccccatggagcttgcagtttagctcatgcagaggatctaatttacctatgcatgacaagacctgaccctcagcatgcataaaggttaccgtggtccaggaggatctagtacaaattttttgtaacagggctgcagaatttactaacacactatgccacatgtggagaaaaaaaatatatcttaaaattttgtccatacctggtctaatcttcctcatgtgcccctgcgtggtagaaaataaaaacaaaacaaagcaactagaatttttctcatccaatgcggtaatttaaccattgcttttggataatgcttagtccctagattgaaagagagaaggaggggaaagagatgtcacaccagataatacttttgaatcctgaaagaagaatttctcaatattttgtgctattcataattcagtgactacaaagacaatacacttttaagtctaatctgcattattgacatttccctcatcattttcttcattctaggcaatcaacaaaacagtaagtgaagaagccctgatctgtcacatttgctcttttccatggtgtaaatactcccaccgtggctaatttaaagcaaccgatgtgaggccactgcttgcaggaaagatatgcagcagcttaccattatgtaatatttccaccaaacagatatgtaaccatcaataacctcaagatcatagataacaataaaaatgtagtataagtaaaacaattaggaagtgataagttttaggcatgcgttacttttgcctaatataatttatttaattataaatttataacatttaatttttaataatggctatgtttagcaactgtcttgcaaaattcctgaaaatttaagaactggctcttagaagtcactatgtcagggtaaaaccatagtaattataaatgccatctctctttcccttatcactgtattttaatccaacagccaatcatgcagactctacctccaaaacatatcttgaccacttccctactgcaacaattgttctcatcaccctcactgctcacctgtatccctgcaatagcctctagttgttctccctggttcattccttatctgtgtctcatagtccactctccacacaggaggcagtcatatttttaaaatgtatgtaccatatcacttcccatcttaaacccttcaacgtcttcctgttgttcctagaagaagactcaagctcttaccatgcccagtaagggcctatcttatctggctgcagcctcccttccaacttcatcttgccattgtctgacttagcacttcattccagccatgctggccatctttattttcctaaaacacacctgttgtgtagctgcctctgggccgtagcacttgttccctctgccaggagtgctcttcccccacagcattccaaggctggctccttctcattgttcaggttctagctgaagtatcatcccctaaaagaagtctgtcctgttttatctaaagtaagccccattgcccatatcaccactctccgtcatattcccttgttctcagaaactcaggcaaattacttagcctctaaacctcagttttctcatttgttaaatggaagtgctgtagtacacatttctcatagggttgtgaggatcaaacgagttaatatatgtaaagcactttgaaccctacttggatcttattaagcactatctatgtaagtttcgctgctaatattatcatcatcatttttattgaagtattattataatcttcattattattggagtattcaaagtacctatcactgtctaagagtattttatctatttgttttcttatttcctttctcctctcctggaatttgagctccatgagagcagtgaccttgaatgactcatgccctgctgtgttccatcacctagaatagtgcctgccacacactaagtacttaaatattttttgaatgaatgtgtgcataaatgaataatgaataaacagaagaactggcggtgacaccattctgagccttggtttatttttagaaaatgtgattacagaggcttgcagtcagtgtggttggaagggcacaaccgtttttgtaggtggtggaacttctggactcttgttgcatgtctgcaaggtcttccacgaattctgggttctggtccttcttgagtgctgagtagctgatatcccagtggtcccaatcatcaggaatattgtgggtgtgcttagctctcatagtaaagtctaagttgggagaactagtaccttatggtccctcctgatggatgagcccagaaacagaactatgagctacgattcctgaagcagccaaaggcaaggaagtccagtgcctctgaacatttgttctgctcaatgaaagaactcagtcatggggtaccccttgtggaaaaacttggagtagcctcagaaagactttcatcctttgcttttgtagtggttacatttagagcagatatgtgcaaaaaaacctatggcaaaaaccttatcttgggcatatttctcttgaacccgagcagttgctcaaaaaggtactatgaaaaggcccatttctatatttttcacttttcatttaggtccctgatatgtcaaaagatgacagggttcatgaagattttctgtaactcaccctcggttgatctggaataccaagctgctttactctacagtgagctttttgaggacagaccatgtgtgttattcaccattgcacagagtacctagctcagagccttgcactgagcaacaacctatagatgcaagatagatttccatgttcagatcaacactgcattagagtatgacacctgaaatcttagcagcagggccttggtgaaactctgtagagtttcagggggatcctccctgcctccttcaccaattcctcttaaggggcactaagcagaaaggagacaggctttggaatcagacaaatgtggcttcaggttctggcactagttaaatgacttagggaatgactaattaagggactttggggaagttacttaacctttctaatttataaaatgggaataaaatggtacctataaagattaactgagataagtaggtaaacatttcagctgagaacccagtatctactgtacattcgattattgttaatatgaatcttctggagtgttttctgtttgtgtatgatcagaatgcagattaaggggcagagaggtctagggcagagtagaattgggcccagtaacatggtgccacatcagatcctggaccagaattatatgagaaagtagtggggtttgggcccagggtttgagggatggtgatggtagtgtatggtgaggaagctgggcatgacagtgtaatgacagagaaaacaatctgtggagctcaggatagattaatttttataatgggaaactgtattaggagtgatatctagatctctatcagactactagaggacatctattctttattgaatatcgactttttaggggaaaaaaagcaaaaccatgttctatgaatatcaaatgagaagaacttgtcagttggctgcttttaaagttacaactagtgtattcgtggtatacagaaaggccattgggtaacacctctttcttcttaaattgggtaaatgaaataatagtgaatcacaagttaaagttacttgtccagactaatcagggaaaggtgaattagaagatgagagggtgaaaattaaagaagaaacaattaccaacacagaaaggagggccgcagatgacaaagatgggagcacgtatctgaaaatggaaggggatggtgttgtggacagaggaaaagagcgaaagatcatcaaaccttcaacaacataaaagtgaccctcacgttacccttaaatggtaatggcacacaacctgaaagcctcaaaagcaataggtatattaacatttaaaaaagagtctttaggcacctcagtaatagactgatgaccactggttggttttgttaatatgtgtgtaggccagagagtaatttggcggaaagaggaagagttaatctgaaagaggaaatttgaagttagaagaacatgaaggcaaatcattcatgataaatgtgaaggaaagagcaagatttaataatgaatcagggggacaaaaaatagagctaacattaatggccacttattgcacatgaagcccactttgctaagcttttcccaggtaccattgcattgttaccacagcaacctgtgcggtgagccctgttgttagccccagtgaacagggcaagtcagaagtttccttgtgatagagctggcaggtagaggatctgagttctgaatctcacctctctcagacaaaagctcctgtgtgtaaccattcagctgaagtgcttgctcaaagggctgagaaaagatgatgaagaagattgggaggggattgagaaagaaaagttcaaagaactttgatggtaaagaatcttagaatgaaagtaagacatgacaaagaacaaaaggaagaaagcatatctaaaggagtaagaaaattaatattttttggccaccttatgtgattaagatgcacaaatataatctcctttagttcacaccagaactccgtgaagtagacatgacttccgtttacacagatgaggagatacaagttcagagaagtcaccgttaatcacgtagctcacaaataccagagccaggattagaaccgctgtctgcagcgttagaaagcccacagtattttcattcgaacttgggaaaggaagtgctaagcctgggtgtgagggagcagagatggcatctacctcgaatggtggggtaaagatgcaaataaagcatgactagaaagacaaaaaggggaaatgagaaagggaggaccacagagtgataattagcctcacaccacctgtttttgctttggctgaagaggtccctcatcaaggctgagtaacaaacaaagcaaccgagtagctcagaaaggcccgcggattcttccactggtcatcgcctggaatgttcactgacagtgaaacgtgatgtggagaaacccctgacaatgacaagaaagattccagacaattgacacattgctgactgcgacggaagtttcatagaaaatgatttttagaagggacaaatatagagagcagctcaggaagacacactctgtaaaggtggttggcaggaagtacggttgctgtagaggacacagcgagacatagctggacgtgaaaaacaaccctgtgaggcttatagcataggtttgtgtatcacccttttgcatatgaggaaactggcccgtagcatttgaggacttgcctgtggtgcctgagttttagaatccaggtgtctgactccaaatctagtgtgtggaacactgtaccattttcatttaaacaaatacatttctaatggtaaatttgaggtatcatgtattgggggaaaaggtttagagcagggatctttactttgttctatacaggtagctcttttcagatgttttttcatgtttagtaaaaacaactctggtctccagatgaatggcattcagctccgtcttgttagtgctgttttgtttgtggtagggttttccgggtgcagattcatagcaccttaactttgtattggctaataattaacaaaagcggctgctgacttcactaagtgattgcagattttactgcaagttcttttgtttgcaactgtctaggatacaatgatcatgtggaaggcagttctttgatggctaattctataccattaataaagtaaactgactactgggaaatacattctcattcttggaccctggagtcttggttttatacataagcatttctgagtaaattggagtgaattaactttggtccatttaaattgggtcaactcatcctcaggcctacaaaaattcacactggatatactgtactcacaattatcaatgccacactgacactctcaggatgttcagatgactaaattttgcttcttttaaaaaaaaatctgggagaattctcacacatacccagacttttgcgctaggctgaaaacactagaaataatggtcaaggtgactttgaagttcctgttaattgtgtctagacacttcatggctatattctatacccctgcttcattctgctctgacaaaattaatatttcccagcttttgattagatttaagtgactcagtgatactatggcaaccctaaactatgggacaaaaatcaatgtcttgaccattatatggcctctttatgaagaaatcagctatttcttggttccagatgggcaatgtgctcatttctccttttaacattttatttaggattcaaagtatttttatagggaaaaccccacaaatctcattatctaccttatgacctgtggtaaagtaatcataaagaagcaattacttttgtcttttttttttccttagattaccaaatccaaggcaactagaaatggcgaataggttttgttttaggaggcagaaaatatgttgattttaattatttcaaaagacacaagtaggatattaattcatgtagcttgatgtgatgatcttaaatgctaactcctatgcattgttcagctctttcccacttcatcatgtatttttctttttttctgtttttcctttttccttccttctttctttcttttcctccctcccatccttccttcctttcttttctttctctgtcttcctttcctcctcccttctttccttttcctttctttctgattcatttgaatttgtgaatccttacttcccactatgggcatttcctccccataatatgtcagcgtaggggcctagcctgcccaagttctgtaaacagactcaaccttcctagccacatccatctccccagacaacaacctggtaggaactgagaaggcttgactgcttggtcatggcacctcaggctctgagtgacgggaactcctaccacctgcattacaggatctgcaggaagtccctctgattttgctggtcgactctgaatagtctgcagcaattcttttgaaaaccagaagaggcagatgagtcctggctggggaaggctgggtagagggttgctgcacacacacagctgaggtgcctcagggcagggctgctcctgcagcagacccctggaaccccttttagctttgtgtctaagagtctctggcttgccagctgcacacagtggttcctttaaagcaaggtgttgtgagtctcagctgaatgctagtacaaggttggcctcataccatgggcaggacattggctacctgctcttgccagtagagcccattgtgtggtcaagctcagaagcacagaggaggagatctggggtcaggataccttccaatgcgactgacagcagcagagacagctggtcaggagctaggttaggccatgctctcctttgccctgttgcttttcattaagactcctcatgggcacagcagccatgtgaccagctctggggtcaggaaagggacctctgcccatggctggagcctggctctactcagccctggccaggctggatggggagaggaggtggagctgcctggagtgcagaaccagccatgggttgtgacagattgacagagggtgaagggctgagaggtgtgaccctgctgggacatgtcctgggcagaagaaggggtcatctaaggccacagaggggccccaaggcaaactctctgcccagcaaattaatttagtcatgcaggcaggagtttggttaataccctagaaacaatggtgggaaaaacgagtaaactggaacaggcagggaagatgcctaggcagcatgaccagactaaagattggccaccagaagaacatcaggagagcccatagtgtcctggaggtctggaaagatgggttgtgtgcactcagatgaagatcccacaggtggggcaggtagaacagtgcaagggggatgccccactgagccatcactgattctgtctttctggatgatggcagaagctgttccagggtggctcatgttttaagaagtagaattcaatctgcacccattcatgagaatggttatgttttcaaaggcagaagggctgatgtgtgaatgcaggaataggtatgattttttaatattcgtctccagaggacagaatcccaaatggaagcaggacctacaaagaggcagatgttggctgaatgaaaaaaaataaaaataaaaacaaaaagcccacctctagcattcgagcggcagcaaatgctccctgagtggcatcctgagtaccaagcccagtgcctgggagacagtatccattcattgaatgggtaaatgaatggatggcccttgatcaggatcccttgttagagaagggatcctctctgtaagagtctggaccatgaaggggattggctgtgacatctgcctcttgatgagcatttgtagatgattctgcaggtctgggtgaacctgttccttgaagcactatcagccactgagggcaagactgggaaatttcagcacaaaggtctggggagtggagaaggggtgagaagctggaaccagatctgtcctggttggagcaggcactgcactgtttggtccaggctacaagagataggtagaactctattttcaaagcgagaatccaataacatagggtgactctgtctatgatatttaatatttgatcaagataaagaaaacaggaaaatgcccttgtgtacaaatgaacacttattttatattcctcatttacccctgtccctccaaatggccttttgctcttaaatgggcttccaatttatttttaaagtcaatttgcattttttctttgcaggtcaaagtaatcactgcaatctgaacacacaaataacatcagtgtgttaggtttcaagagaaatcactctgctattttacagtaacagccagggcaaacttatctttacatcaaatgctgtcagtcactttgaaaaattatgcaagcagcaatattcaatataaacaatatcaatatacgtggagtgtgtgaatttttcctttgtaggatacaatttgtctctggtagttcttgaaccatttttcttccttactcatagcctgctatcaccctagtctcccttatctactatcttgactgctaccacccatgtcagaaccactattatctttcatcttatcctatgagcctcatgaagccctctttccttcttcagcctattcctaacacagcagtgtgagtgagcatttaaaaaaatcaaagtcgactgggcatggtggctcacgcctgcaatcccagcactttgggaggccaaggggggcagatcacttgaggtcaggagttcgagaccagcctggccagcatggtgaaaccctgtctctactaaaaatacaaaaattagctgggcatggtggcattcatctgtagtcttagctactcaggaggtctaggcaggagaatcgtttgaacccaggaggcagaggttgcagtgagctgagactgtgccactgcactccagcctgggtgacagagaaagactctgtctcaaaaaaaaaaaaaaaaaaaaaatcaaagtcatgtcttgcctgtcttccctctgcttaaaaccttgcatggcttccgttttactgacagtaaaattcagagtattgactgaggtctacacagcccttcatgatcagtttctacccctcttacctataatctcctcctctgtttctttaccctcactccattctacccatatggcctgcttgctgtttcttgaacccaccaggtacctatgcccgagggtcttggctttagctctctgcctggagcagtcttcccaatggcatcctctgggttcactccatctcttcaagtctttgctcaactctttccctgccctgccccatcgaattctgcaatttagcgcccaccactgtactcctgatccccattaattggctctacttttttccttcttcctcattgcttatcatttcttaacatgctttatgatttacttatttattacatttattatttattgttagcatccccaaattaaatgtaaactacacaaggtcagggtctctcttttgctcaggtgcctagaacagtggttccccaatctttttggtaccagggaccagtttcatggaagacaatttttccaaagacatggtgtgggggatggttttgggatgaaactgttccaactcccatcatgaggtattagttagattttcataaagagcacaacctagattcctcgcatgcgcagttcacaatagggttcatggtcctatgagaatctaatgccaccactgatttgacagaagtgggagctcaggcagtaatgctcactcaccagccgctcaccccatgctgtgcggcccagttcctaactggccatggatgggtaccagtccgtggcccgggggttggggaccagtggtctagaatagcatctggcacttaataggtacctagtccatattattgaatgaggaagtgaataaatgaatgtttttggtgcatattttgtcatccaaacctttatcattaatctgtgaaacatatcactggccagtccatttggtcaactcctcatttattctttgggtacctgttgctatcgaatttgatcattttatatgcaaataatatcaaaactcctttttttgttttaacttgagaaaaattattaccagattcacctatgcagttaaacatttttctttttgtagttcatccagctcaacagggcttcaagatagcccctgagccagtctttcttttaggtcaatgaagttccaaactttctgacacatttgctattcttatcctcagtagactgttaataacatgagctccttctgctgataaatttgtggctctcctgctttaacttaagcccttatttattctgtctagacatggataactggttactagagatctcttccccagtagcccttcatggagctgaggaaagtaaagctaaccttcagcattttggtctatgaatgaaaccgctccaatatcattttcaccaggggacatactttttattttgaaacctgtaactttagtgagtaaacttcaaaacacggcatgcaaatgtgtactacaacaatttaatgaatgaaacaatttactaaagctcaaatttaaagtggtgagcaaggattgcctttataaggaaaccataatataacttggtttaaagagttttgtttggttaaaggagtaaaattttcatgacagaaggagaaatcccattaagatacaacttcgaaacaatctgaaagcttgggaagataagttaatatgttgcctgaaaaagtatatgaatatagagtaatacccaaattaagttgatgaattggtagaaggatgtttaactagacctgacgagaagttaggagaagaggattaggcagattcaaacacagtgtgcttcaagacgtgtgtgcttcaagacgtgtgtgtgtgtgtgtgtgtgtgtgtgtatgtgtgtgtgtgtgtctgctaatgaagagaacaagaaagcatggggtttgagacctcagaactttgcatgcaaatatggccacagctcacaccatgaagaactgaaagcagtcctttcttgaaagagggaaggtgtagacctgaatggactaagagttaaatgtggcgtggggagtaagacacaatgtttttcttaagaaggcaattaataccttctctataataagtactaatcaattgttaaggtaatctgaaatgtctctgaagcctcagaaccagaacaggtaaaattgggtgaatgtctagcacaagaataagtgagtaaacattttccatttgttttagtctgtttgtgctgctctaacagattacctaagattgggtaatttataaagaatagaaatttatttctcacagttctagaggctgagaagtccaagatcaaggtgccagcatcttctgagggccttcttgctgtgtcgtcacatggcagaaggcaaaaaggcaagtgagaacagaagagtaaggtagttaggtagctgaatgcatcctgaagcctcctttaaaaggacattaatctcattaagagggagcagcagtcatggcttattcacctcttaaaggccccacctcttaatattatcacattggcaatacctgaattttagagtaaattaagtttcaacatgaattttggaagagataaagacattcaaaccatgggtttataattctttaaatactgatatgttatatcttatataatttagattacaaatcaataacattatgtctagtattcaacaaatttaaattactagtgaactccactgtgctaaacagtaaggccaccaaggtgagcaaaagcagtccctgctgtcaagaagcttagaggacagaggaatgttcaatcatagtatatatcatttgaatgtttatcttaataaagaaataaaactcagaagtagatggcctgcacattaatgtagttaatcttaaatctcaggtctgtgcaaagccccgtaagcagatcactcaactgaaagtcattgcagcatcacataccactgataatcacctgaactgcagacagagtgactaaaaagaattgatcattctcgagagcagtgtttctcaaagcatgcttcagagaccaacctgcatatgaatcatggcgcaagcttgtttaaaatggattctcaggatccttcccaagaacttattatgtcatatttacagtgttgggtgctagagtctttgttttaaagaatctcaccaggtgattcttagtctgtttcagcaccatgctgtttgggtctgacacagaatgactttcatacatctaaacctatgacataatcccagcactttgggaggccgaggtggaaggattgcttgaggccatgtgttctaggctgcagtgagctatgatcatgtcactgtattccagcctaggcgacagagccagactctttctctaaacaaataaacctatgacgtgatgacagacaacaaaatatcctaaatttatattggcttatattccagtgacatttttattattgatttatttacttcattgtcaaatataagccagcccttttctatattgcatttgtattcttggctgacttttcttttccttctagttataccattttatatttgtagctattaaattttaccctgtttttgtaaaacaattaaaaaacctggtcaaagctattttgaatttacctcttttctctgcagtattaacagccccatgtaattagaaccagtcacacatttactgaacccacgtctgtaaagataatgacaagtaaacctcctctcaatcctcctcttcagactgatttctactctacccattaatgactctcagccgtgaatagcattggcgttagcttgtaggacagtctcataaagagaaatgactattttctttgtatatagtatattgtttggtttatacaaacatctcatttaaaaatgcttagagcattttttaatggtgggatataaagaagaatttttgaactagtatttttaatcgaaaaattctgaacttctagatggaataagaacaggaagtatacctttttcatatcctaaaattaagaaataatttagaaaaactctggcagatgatatgagccacatgcaaggctcgggtctcaaattccgtctatacagagctggggaaagtattttcctctttataaggagttcactgcccttcctggttcaagttctctggccatcagaacttctggtaaaatctaagccttccagattttaagattgctagctgtgaagctgatattttaatgcaccgtgttttaactgctgctgctttgttctgtgtgtcctaattgaatattttcgattttgcacttatggcctggagcaatttaatcatccaggatacaatttaatacattgaagaagtatgaaaagtgttcagtaatgagtgggattaattgctattgtgcctcacacagtggcatgcaaccaatagatgcttaacaaatattaatttatgattgtgacaggcagccctaggggcagggaacatgaaattttgagttagttttccttttctctagtcaccatccaatcagagatgaggcacttttatactttagttttacagtccacaaaaggaaatcatttttgttcatcattatcaacctaggatagagaaagaaatgcagagggattaacgtaataattgtctttgtgtttgaaggtggcagctggccagttgttctcaggctcacatgaagaattagaatgaaatgtgtttgactgggaaggactaaggttagatgaagaaattctggagagccccttctgaacagcttttaactaggctctcgcttcagatggccatgacagaaggttgtaccagatcacctcttgtacagccctgtcactctaaactgattttaagaatatggttatcgcaaacaccgcatgttctcactcctaagtgggagttgaacaatgagaacacatgaacacagggaggggaacatcacacaccagggcctgtcagggattggggagctaggggagggatagcactaggagaaatacctaatgtagatgacggttgatgagtgtagcaaaccaccatggcacgtgtatacctatgtaacaaacctgcatgttctgcacatgtatcccagaacttaaagtataataataataaaaaaaagtatatggttactggccaaaggtaacagcaagggtagttcttttgcatagtcccttaataattatgtggtctagtaatcaaaacactatataaatgcctgaactcggaaatgtagcaaccaagagatatggttgaaaggaaccatcaaaattaccagctaaaaaactggctgattgtacattgtacattgagagccatagactgctcatgacctttggcccagagtaggggtcggcaaactgcagacatctgccctgttgcctatttttacatctctaagagtggtttttacgtttttaaatggttgaaataaaatgaaaacgaattatatttcatgacacattggaaactaaacaaattcaaatttcattgcacatataccaaattttatttgaacatagacatgcctgttcatttatgtactgtttgtgtctgctttcataatccatcagtagagctgagtaactgagacagagaccatatagcctgcaaagccaaaagtatttactctctgcccctttataggaaaagtttgctgatctctgatcttgatcttgagaatctatccaaagcaagtggctcatgaactgtggaataagcaatatggcgaaagagtgtaaatgtagtgttatctattatggaagaattagaaaaacattaaaggttttccaactatatagatatttttgaatcaattttggaatatccactcaatggagcttttcaaaaccaataaaactgagggcaataactagctaccaatattgaaaaataaaatagttatgttaattaaagtggaaaaataaatcagagcaccaacctgtgtaactgtatgatgatagcctttaattagtcaattaattcggttatccaacaaacaattattgagaactagaatattattgaggcatacaccacatacgtgaggttttttaaaaaagcctaggaaatatttatagtgattgcttaaaagtcatatattttgttgatttttttcatctcaattttatttttttccctcttgtgatgtttatgctacctacatattaaaaaccttatggacaaagattggaaaaagcagcagagtgtataaaaggacaataagcagctctctataagactgaaactgtctggtggggtttgccgaggattcctgacactgaggatagcagcttgttctgccccagcaatttctgtctcctcctttacaacatttatctttatgaaagagaagagcaggcttccctttacaatctctcctgctttcttcccccaccaacccagggagccagcaggcatgaaaaactttccctccattgaataaatataaacaagcttatttaccgtcagtttaccatctgcgtagaccgcaactctctctctctctgaagagatttaaatggtattccatgtccttcatgtgacttagtaactcatacctgagcaaggttgaagtgggagtttttctgaagtagaattggttctagagcctagatactgaacaccctgttcctccccagtcaggaaaatgccatctgttacattacattgcagtctttaaaataaaagtactacttttacttgccactcacttaccttgcttttgaatattttaagacatagaaggatgaaattaataacaagggcagctgggcatggtggcttacagctgtaatcccagcattttgggaggctgaggtgggaggacagcttgagtctggtagtttgagaccagcctgggcaatgtggtgaaaccccatctctacaaaaaatacaaaattagcaggatgtgatggcgcaggcttgcagtcccacctactcgagaggctgaggtgggaggatcacttgagccagggaggttgagtctgcagtgagctgtgatcacaccactgcaccccagcctgggcaacagagtgagaccctgtctcagaaaaaaaaaaaaaaaaaggaataacaagggcaacatatttgtaagattacatatgtgattggcacagacactaaagggaagggcactaagaaattgttatgcacatagggcatctaaggaaagatgaacaaaagaagttttaaaaatgctaaaatgatcaaacgggcaatccaccccgcccagtgttcggaggttgcaaggcagggataacccccggttggggatgggggatggggcaagcgtgcaagcatcaactgttgctccgtatgaataaaattgcattgactttacagacatcctctcacttctggatacagttaggctgttcagagacaactgtggggattgaagaacttgattaaatctaataagtatttattgagcaccaacaatagtggggtcaagaaataatggaagacattgttgcattctgggcagcaggaagaaggtttcgtggaggggatggccataatgccaccacggttgtgattcagatatgagatggtgacagcacaaaagagagccaagaggaaaacacgagacacatttcaaaggaaaaatccatacgacttagtgattggttagatggagggcattattagacattccctgggggcagagtctgtgcccttgacatgccacaatggttaatgtggtacctaccatgtttgtagccaatgtgctttgaatgaaattgagttaaagatgattgttatgctgggagaaatgtggtactattaataagattacagggtaaagacataatggtagtgatttttttttatttttttaaaggaagattatgggcctcattttgaaaaaaaaaacacttaaggtaatgatggtcatccaacattaattatctagctagctgactgaaattctggggagtgcttgaaaagcattcctgtattcagtgagtatttctttatttctttagttttgaaactcccaaagaattgattctgttttctactaacttttttttttgttctgtctttgcttcactctttcaaaagcagttggaaggctctcagttagtatccaaattaatgttgtccatacaaattgcctgaatttggagtaatgacagccactcataatgggggatatttttgaaatatcctaatgagattgtctctgttatattttctttatttttccagaagcactcatttgccttgagaagatttaggaacattatagaaggaatacaaagggataggaggcttagtatttagcctctgatatcaaaataggattttcaaacagacaacagtcatgtaagccagattttgctgagaaagagttttctaaatctctttaccatcagctaccaagagtaagctaggaggattcaaatcatatatatatatatatttttttttcttagtgcagagagaatagctcttcctttcaggacagccaggctatgggggtggctaatgaaggagagaagaggatatgacatagaggaaggagtaggtctaagcctggcccttctgatccaaggaaaagaagacaaggagtttgaggatgtcaaatatcaaagttctcacccctctttcctatgcaagtttgaaaattcagcaggtaaggttttagaaatatttaggtagttatgtggaagcagaaggatattggactcatgccttccttttctgagggttgcagagcaggctgtggaccctagaaaatgctctagcctttgagcaactggttcctcctcccacggatttgaccttaaagacacaaattccctattgaggggttccagaggtggagagagaacttgtagagaggtgacttctgagcaccaaggattcaagcaaaaatcatctgaagagacagtgcaaaggaatggacaggactaacctcctctgtagattaaacaaaatataacccagtggactccctgcattcccccaattctcaacaattacggggactcatgaggaaatctgaaaagctatagtgaaattaaaaacctgcatttatttgtacacctaagtgtatacaatgtgagtgaatattctttgtactatacaaagttaaaattaggaattaaatgaggattgactacaataaattattctgtttctcagtgtaactctagatctagaataaagcggaactaagaaacttgtcttcagatctatggcattaattccgatggctctaagtaagaactgtcctaagcccttaatagaacatcttcctccaatgatattaaagtagacttcataatatagtgctattttaagagtcttcatgtattttctgagatccaaacaattggattgattgccactattgaaatcgtttcaagtaacaaagcattataaagaaaatctatacaaacatccttgaattatatgcttcacctcttgttctttaatcatctattgtcattactctaatttttccctgtggtatatgatttgctaattctaagtaagctagaggaaatttgcattaattcagaatctgatattttgtgttttggaattcattgaataaatacttactgagcaagttcttcttcccagttaggtatttctctccccatccataaccctgcttagcagttgaatgggggagattgagaggaacagctttgcccattcaataatgcaagtaataataaatgtaagtgctcatcatttgtcaagcatggtatgtaattataattactttgtataaattatcacatttcaccatcatagtaactctacaaatagggattgttttaatcctcattttatgaatgagaaaactgagacttagagagattaagtaaattggtcaaaaatcatatagttagtaagtgatagtgatgagattcaaacccttccctttaacagggttctttgcctccctctgctattttgggatgatgctgtgggctctccttcatgtcctctagaatacagaggtcacttttagcctgagtttaggtctagaaagtaaggtcaaatcagaagcagaggtgggttactcagtaaatgagtatgtatataaataaatgtgtgtgtgtatacatttttgaatttgccattgtaatagctataacactgctgacattttcctaatagttttggttcattaatttctagttacttcaaacttcatcaggcagctgtcctgttgaacaaccgttctcaaacaatagtttggtgacccctggaggtccctgagacccttctagggggtttacaaaggcaaaactgtattcttaataatactaaaaattgtttgccctttttaatgtgtacagtggaatttttccagagactgcttgatatgttctactaaacacaatgaatactgaaggagttatgagaatctagctatcttctaatcattctagagatttacaaatatttagaataatgcccctgttttccctatttttttttttgtcaaagaactatagttatttttcatcaaagtatttatgtgggtttataattttgtttttaaatgaattaataaatattttaaaagatctcagttttaacttttaatacaataagtatcaatagatataattcacataaacaaaatatctttgagctccttagtaattcttaagaacataaagagttcctaaaacctaactttttgggactgttggaatagaggaaggaatcctggaattggcatcagaagccaaggcttcacctctaccatttgtcgcctctgtgatgtaggggaagccatctaaacatgccaaccttaattttctcactgatagcagtgagaggatagtagcacatacctgcctcctaggtgtagaccatatgcaataatgtgtgcaaagtcaccccattcatgagagtctcttataatttcattttatttttgttattattttttgaaatgggggtctcactattgttgctcaggctggtattgaactcctggcttcaaaccatcctcctgcctcagcctctcgaatggatataatatttgatgggtaatagattctgcttattcagcgtaaagtatacattcaccttagaattttttaaatgtgtatgaaaataattcaagcatatggtaaaaatgttgaatattccagaaggactttttgtggaaaagtctcctagcctttaccccgtcactcccgctccctggaggtaaatatccacccttgctcactgctgttttcagttccttaggtagttaccatcacaactctgcataataggctcatttctctgtttctcgatgagcatttttagactgtgtctaacaagtctctgatgcgaaagatgaggatataactcatttgtattatattatctcctattagatgctaatctatgatttttaatagaaataaagtaattttcaataaacggcatttgcattgctgtgactttgtaaataatgtagcctgcatgttcttctctattggctctacgccaagattaatctttgtgccacttggagacggtttcccacataaaatacaaatgtgttttcagaatatcctcaaaaacacttgtttttaatcattctgttacatggaatccactttctctctctttttttttttttgaaacggagtcttgctctgtcgccaggctggagtgcagtggcgcgattagaatccactttctttacagatctctctctctctctgtctgtctttccccatgaatcatctatctattgttccaatctcctatgttgattagcttccaatttttattttatagatacaatatctttatcaacagccctgaggagagtaaagacaattttttaactagctctcttctgtttgctgaattctccccattccctttgagggctctttgttttgatccttctgttttgtgctgttgatttgatttatacatttcgtgacccttcactgcctatttgtacttagacacagggacaggatataatggctgacgggcttctgggtgatttccaacttccagaactgggaaactttactctggggtgtgaactgccattctaggagtgtctgtgtgtttcctttctttagaaaagagcgtggggacaaatgtcagggtggcctgtaagggtgtcgttctgcatttaagagtggaagtagtggtggtgggtgcaactgttctctaaatagatctctaatgaagtccccaggtttcaggtccacctttgaactttgccctctgtaactacagattcagccactcctgggaaccctggtgcatccctactctggagcctttctttttggggatatccagggcctcttctgctatcatgctctttttctttttccattgtccagatatttgctgatctctttcatatgctgatatcttctttgctttctccttactcttataggtttcttcttttttctcttcctgttttactactttatgaccatttctatagggtttcaggaaggaaggtaggcaaatacatatgttcaatcatcgtcttttataagaagcctgtggtatttctcttagaaagctattttaatcattgattgacaagccattgtatcttcaaattttatatttcaaggaatttggaaagtaaatctctatgcattaaaatatattgcccttaccatttttcttatttcgtttattacgtcaactgtggcttacgtggatgattaaacttaaatagtgtcttcaaggatgaatgaagcaatgaagatttatttaaacaataccataaaactactagacaaggaaaaattcatttgcagccatctccaaaactcaaagaaatatgtgatacatgagatttctatattaagtttataaattttttaagtgaaccatcctatgacatggaaggcaagcttgcctggctaaaagcatcccagggaggaaatggccagggtttcgtcagtcaccaagaagataaatacaccctgcttaaacccagtaaaggtgaaaaataaatcaggaaacttctttgcggtagccatgagaaatgttaggcattatttgaaggtcaaactcacactttcaaggcatcatcactaacttatacaagcctgatctctaaagactatcttggttaaatattgatcatgcttcaagctccacttaaactgcaaatactgaccacatctacctatttttctcattatcagctttattgaagtatgattgtcatgtaatacactgcacatatttaaagtgtaaagtttggtaagttttcccatcaccttctaaaattttcttgtgtcccttagtaatccctacctccttccccatcctgctacccacgcttccttccttccttccttccttccttcccttccttccttccttccttccttcctttctttttttgacagaatctcactctattgcccatgctggagtgcagtgacaaaatcccagctcgctgcaacctccgcctcccaggttcaactgattctcctgcctcagcctcccaagtagctaggactacaggtgcatgccaccacacccggctcatttttgtatttttagtagagacggggtttcaccatgttggccaggctggtttcgaactcctgatctcaggtggtccacccacctcgacctcccaaagtgctgggattacaggcgtgagccaccgtgcccggcctccccctaccatttctagaaaccattgatctactttctgcctctatagattagtttgcgttttctaggattttatacaaatggaatcactagatgtatttttttgtttgtttttggtctggcttttttccctcagaatgattattttgcaatccagccatgggtttgtttccatgttagggatattacaaataaagttgctatgaacatttgcctacaaatcttcatttgtgggtgtaggcttttacttatcctgggcgaggtcatatgatagacgtctttaactttttaagaaattaccaaactcttttccgaagtgggtgtagcattttgtatgcctactagcagcgtgtgacaactgcagtttctctacatcctcaccaacacttgaaatgcccagtcttttcaattttagctattcccatacctatgaagtgacacctcgttgtgatttaatttgcattttcctaatgaccaatgatactgaacattttctcaggtgcttatttgccatgtatcttctcttgtgaagtgtctgtccaaatcttttccattttttattggattatttgtgttttgattactgagttggagagttctttatatattctggatacaagttctttatcaatatgtgatttgtaaatattttctcccagtctatagatcaccatttcattctcttgccaggtagctaattttatttttttgtgatttttatgggaatttttatgttttaaacaatgataatagtcatatttataattagcatattcaggaatctatttgttttaaagagctatacagaaaagctgaggtgatgccaaaattttagctcaataaaccaacatttgaaaaaagcagttcacttcaactgtgagatatgaatctataatgggaaatacaattctatggaattcacagagcttacttgttaaaaataaaaaaaattacaaaaactgtaattctaatgggcttaaaaagcaaattcaattccgagtataaaaaatttattttgagtttttttttttttttgagacaaagttttgctctgtcacccaggctggagtgcagtagcatgatcttggctcactgcaacctctgcctccaaggtgcaagcaattctcctgcctcagcctcccatgtagccgatattacagacatatgccaccacgtctggctaatttttgtaattttagtagagacggggtttcaccatgttgaccaggctggtctcaaacccttgacctcgagcaatctgcccaccttggcctcctaaagtgctgggattacaggcgtgagcctcagtgcctggcctattctgagtttcttaaattgcaaaaaatatttcaaatgtagtatttcttttagctctctcggtttctgtctgtctctcttcacgtagatattttagcctgaattattctaatgaaataatttattcagccacgctatctttcaaccttttatagatagaagactcataatcatcagattgccatagaatatttgattatgtgagtcacattcagtagtaatgaaaggggagactatgagagatggccctaaaccttttacaaggccctctaaatccttaaagcggtatcaaaagtctgctaaatttacttctggaattaagacaaactctaaataaagatgttcaaacactgtgtgttaaagccagcaagcaccctagacttgcttatgccttttctgcagtcaatgggaggctgtgcgtcactgtacagctccactcactaacttctttatcaaaaatcttctcccttatttcttctcttctcaagtgcttgcaccaattaaaaatattcttccaaaaatagttgagatttacatgttctagatattctttggaagtagcgactttgtcctctaacatgggaacatcgtctcccccagttgctgaagtcagatagatacttgggcacagttttctttcttctctcattcccaattctacccccatttcaagccatcatcgtgcctctgctggttgagtacagcaacctccctcttgatgtacctgcctccgttctcttcctccatcagtccattattcacactgttgccaagtgatattttcaaaatataaatccaaacacattactttcctgatcaaatatttgccatagctttttattaccttaagaataaagtccaaattttttagtgggactttgcaaggttttccttgttggactttattcttaaggtaataacaatacgagaagagagggagatagaaagaaaaaaagttcagaatacaaaatgagcaaagctgaatgattgaatggatatagggttgtggtgaggatccaatgagatgatttaattaaaagggatttgtgagacataaaacactattttaaggctactattatattattattcccacctgtctctcagtgaatctctgaggattactgaataccagaatttcacttttaagtgttgtgttattccagcctaggctcctgaaaccctcggacatggtgctggttgctacatggctctagacactcagataaatcttggacccctggacaccttcgtctgcatccccagtgcttagaggtgtaaccttgaacagtcatgctgcccagtgttcagtaagtcagggtcattctgggagaggaactgtgaaggtggcggaagttccccaggcatcacacatgactcagacccattctgccccacccgtagcttcccctcccatcaaggagctccttatttttgcctcctcttgttgtacttactgtggagggccgtggaagcctttgaggaccagaagtcttgaggcgataggttctactcgtgaatcctttgaatgcaaggaacagaaatcctagaaactgggaactagaaaaatcagcagctggagctagtctggagatcctaagtgtcatatgatctgtctgacatctgcatctgacagagtgctctgatcttctgtgccggctggctctttacacactcatcatgcacaggaccctgcatggcaccctccagttctatatctctcacgtgtatcatgactgctcatctctaacgtccactaacgacagccctagttgttcatttccaattccatatattctcatatgaatggtccaaattgtcatttgactaaggcccccaagtctaagctcactgactggcctatgggtcaggtcacctgggttaggtattcaccagctacccaattacttgaggccgcaaaatacaaggtcatgtgttttgatgctcacttagtaggcactagagtgagaattcttcaagaaagcaatgtgactagggcaaccataattcacatccctaataactgagaagcaacagagtgtagcactgaaaagcgtagactctgaagccagaccacgttgttcagacttggcttcaccaggtaaccttgggtaaattatttaacttctccgtgtgctttggtttcctcatctgttgaatggagattataatagtacccatctcatagtgttattataaggactaaatgtatgtgtgtgtgtgtgtgtatgtgtgtaagcccttcatgtttagtaaaaaatatatataagtgctagtaatcattatagggatggaaatctgaagcacagaataaggtaaattaagaagggttgtagatgactggttgtataatagctgcctggatagagggtgaaattcagctaaagtagagaggggtggggaacaaaagcaaatatgtgaacacagtaagaatgaattcagaattcatcagttgaaatttggggggcagagatatgggaggggttagggacataggagagcaaaaaggaacagagtgggtctggcttaggtgcagacacgtgcctcagcagcacagacacaagaagcttggatatgcccttgtggtcacagcatcttctaaatgggtcttcagcaactctggcccctggtctgttcccccagcaagagcagctggtctaggataaaaacctgaaagcttcctgaggagtttaaagatatattctcttgagatatgatgttactgtagatatctagactagattaattcattaaatcattcacttatagagtagtcatttggcactcaccatgggccagtctatgctggggggtacagcaataaacagagctcagcaccccacagcttacagtgtaggagggaacataatatcccatgaaggatggacaatgacgggaagacttgcaaaggagaagcaaagttgaagccctgggaaagggctgaaggagcagagctgacctaggctatgggtcaatcaaggtaggcttcctggaggaaactacaaaggctgagtggaggaacactgggacgggaagaggggagaagagcatctcaggcacagagaactgtgtgttcaaaggcctgacagcaagaaggagagcagtgcttgaggaatgaaaggatcctagtgtggctggacaggagaaggtgagggcggaggggccagcagggccatgctgagaggctggtgcttttatactttgggcaatgagactgagcttgtcacccgcagactggatgactggatctcactcaaactgatggatttgacctctcctgttttgctggggacaggagccaggcactctgaagggggagtaggggtcacggtaccatcagggcagaggagaattcaagagcaaggtgggtctgtatcaagagcaacttcttgaacttcacaattttgcttaggggccttgtattccttaaaccaccaccaggaaaccaaagctctgcatggatgtgttttcagtttttcacaactgcaccccatacagcctcagaaatctctattttactgtcccaccttagttccaagtgcctcctaataggccctacagaatgatgccagtggactacctgaaagtcattaaaatgaagcaaacacaatttcatgtttctcttagtttcaggctacctcttgaagaggcaacagacacaactgagtagtttctctacaaccctcacatatgtatacggtgttgcagtatctctgatgatgcacatcacttggtaattgaaacgctcaaatgataaatgattggctttttatttagctaggcttttttttttttttttttttttttgcagggccatagtgaaatatttacttagcctgctgtctttttgtgtgaacaggatacggtttgccctggcttgaggatgtgctctgtgttgtttgctcatggcactgtagaggactgttcctccaagcacttccttctcttccacaacccatcttgaaaccagagaaccagcaggactaaggatggaattgaaaaaagttgatgaatttatgtttcatcttccatctctacttcttctcctggaggtgtgaacgaataatgaaactgctaaggagaaaggcagcatgaaagaaggaggctgcacaattggaccttgcaaattcaagatctagatcattagctgcaaatctgagttggaggtgctgaatactcattcacacggtcgtgctcatagcagcagcgagattttttttcttgtcacgatgaacagagtgtcctgacaccttgagacattaggtgcttgcagaacatagtgtgaggtgacaagggaagggacttgcccttcacctccacaccactccaaaaagccctaccatcgtgcaaaattacatacacaatctcatgccacaaaatataaaccaaccactacatttaagaaattcgatttctcccccttaactgtcccctgtgctttctgagcacatagcatatttttccctaatcttaaaatttagctttaaagttcactgttaaggaactaagcagttttttagtcaagagatatatgctggtttaagatacacaaaaacttgaacagtacttgagatcttttgagaggaatgagcaagaaatcagatatttgccttttcatcttctgtagactcatacagcatcttctacatagctagggactcaagaatgttgaatctccaagctaaagcatctatcaaatgttatttacataaatagagcatatggagggaagcaaaaaagtggaggggtattcagagaggtgatagctctggaaaggaagaataaaaaatttccaaggaggcaacaattcctactgtctgccagtctgtccaggagattcactagactggccactccagttctccccagttcggttgtgctccagggaagacagtgttagaggacaagaagcaggctggaaagaaagtagaataatgcccttagactgcatggaatctcaaacaagttttacttttgtgctatgtatataaggagatctattttctttctcactgaggtcgtatcagtagataaactgcgatctctgtggaaatctttttccttatttttaaagtttactactcatttttttttgttcaaagaagctgttctgaataaagttactcaatacagttggaaaaactgtcatttgatccacttctgtctttatcagaattctgcgttttcttctccttgaacagcaaaaatactactgtaaaacaaaattattatttaggaacaaaatcagttaactttctgattgttgaagggagattggtcaacaatgttagctgttttccactgtcttatttttaagaacatgtaatattatagttgttttctcagtggtggcttaaaaagggagcacggtaagaactcattctaaaaccacaatttctcttggtgctatagatcagtttacaaaaggcagttctgtaggcaatgttatctaaaaacatatgactgtgaaaacagacaccaattatgaatcaaagtttaggcacttttgtctttttctttcttttctttttttggctttgtagaataatcttagctgagcttgtctagtgagataaatcgactgacagaaaccagtaaactaaatgcagcacgttgatgcctgtcattagaacacctgtgagtggaggatagcactgtgcaacttaaaaacaggaggtcaaagattgctttttaagaaatggaaacgtatatgtagaaataaatgttgtccttttcaaagtattgatagttgctttggaagaccttccactcatacagtcttgctatttctccatgtatttttgttagttattttttttagcattgcttttaaactctgtgtgacacgttattttgaatagtctatatgggagccaatagtattcttgaaggatggctttaggctttggaacaattgacagttgtttagaggtgagtaaatcacgtgtcaggatcagaagagtttagaactgggaatgggctctcctggatttgagtccagcactgtcctctactcgtagtaagaccacgggttagtcaaacaactgatgtgagcctcactggagtcgttactcactcattcagtcagtcactcagtcattccatagaggtgtactgagcattcactatggggagtggataacagaagatgagggatggagtgattacctctgactccaaatttctgtcctaggttggtgattaatcttttttaaaaataaaaataacagactaagtttacactagcattaagtaataagaatgatattattttggatggtttttaaatcatcattgatgacattttccaaagaaaatgttttgagcgactatagttttagtaagtaaaaattcaacttttttaattgacaaaggtgaaggaccaggctcatttcaggtgcattagtttggtatctggaccccgtctcccttccccttccccttccccttcccttcccttcccttcccttcccttcccttcccttcccttcccttcccttcccttcccttccctcccctccagtggcttgcaatcctagtcatgcagcaaaataatctatggcatctttgaaaagtactgaaaaatatgtagaggcttttaaatatgtggagtcttttaaaagtacatacttttttttttttttttgagatggatcctctcagtcacccaggctgaagtgaagtagggcaatctgtgctcactacaacctccgcctcccaggttcaagtgattctccagcctcagcctcccgagtagctgggattacaggcacacgccaccacggccggctaattttcgtattttttttagtagagacagaattttaccttgttggccaggctagtctcaaactcttgaccccaagtgatccgcctgcctcagcctcccaaagtgcttggattacaggcgtgagccactgtgcccagcctaaaagtacatactttaaaaagtacatacaggtgctatatgccaaccctcttcctgacttacaatttcctgaagaaggtctaagtcataggtatttaaaaagagaaacatgggtgatttggacacacaattcagaataagaaccgcatttatgataaccccttgtacttttagaaatttctacctttatattagtatatcatacctaccttttctcataaaactttcttgtagaaatggggttttgctatttttcccaggctggtcttgaactcctagattcaaacaattggccctcctcagcctctcaaagtgttaggattactggcatgagccactgcgcccggtcccaaacttccctttaaaaaattttatcttagcacatgttatcaaaactaaattcaatgaatatatggaaatctgatccagagagaatttctccatctactgagttgtaacatctctttaattgagcatttattatgtaattaattctgtgtttgttgtttgggtgactgactataaaagaaaattagaattcaatctctagccaaaatgaccaattttagaaattagggaagatgttgatagtattatgaaaggggcattcagaatactgagatcttctgcaagccacagccacccttcctcatgaatccctgaggatataaacagggaatgccgcaagttgctggctgggctttgtagctggacaccactgccagtcggagggtgattctgaactggatcacaaagcctgggctagacactcatagtgagcctcttcacagttcctggtcatcaccccaaattgtactgcactttcgatggcaacatgaaaggaagaaaccagaaaaaaaggaaattgtcagtgaataagagctccagagagccataagccttctaagggagcagcccctgactcagccagctgcctttggttctgcgtggacacctgaggagaaaaggagcaagcaagctcacccagcttccaaccaatgagctagagggtatgctggaatccaataagcccacagtcacttgtgaggggtggcagtcaaggtgtggggtggaaaatggaacattcctactctaaagcctgcagatgacaatctgaatgggcaaagagtaaggaattcctttttgggatttgcaaagcactgtgtatatttatacattgaagttatttacaacaacatattttaagtgtctgttttctgcaatccctcctactcattttccttagtgctaacacagttcctagcatgcagtaaccataatgccttataaatgaatgaaaactatcatataaaacaattacagaatccaaaactatataaataataactgatgtgacacatgccactttatagaagttcaagaaagacacagttcaatggcctcaatagttaggaaaatcttcacagagaaagtgggcttgggatagacccttaggcagagtaaactttttatttacatacatctgacctggactgtggactccctttttggatgttggaggaaagtgaaaatcaactgacactttgaaaattaacataaattggaaatctgtccagagaactttagtggtctatatagtcaatatatagaccacttagtggcataattaatttctcttctagatgagcatccacagaggaaagactattacagaaaatggtaaataaagtgaaaaaaacttctctcatagagaggaagggagtaaaaacttagttttcaaaactaaggggttttttttacatcataatgtaatatgctcatgagaagacaacaaaaatagggagaaaaggaaaatatccatgtcccatgagcaaccatttttacatctcagtgagtttttttctaggtgctggaaacctcaagcagcttgcttcaataaacatttcacatatccttccttttcttctcttgtgatacttcccctgctgtctctaaacagaatgtacactaagattaaattattttagatttaaaatatggattgcttaggtcttagaaacagaacttaagctaatgcttgaactgaaaataatccatgatactgaaaaaaatactcctctccaaaatttacatgatgtagtcaatatctcagtatgggctgcctgtatagcattctttctttagttcattcaataaacatttattgagtgcctaatattgccaagcaacctggtaggcactggtgatgaaaaggcaggttcctgcccgtgaggagcaacttgcttatggacaaaaaaacatgttaagtaaaaaatagttgttgaggaagattgcaaatgattgacaggcatgggattcctaaactctggccagactttgcttctttagtattgaggtctgctgtcttctcaggggccaaaaaaagggttgggtatttagtcggtcagctcttcccccactcacacagcaccttgtactggtctgattatacctctacccccctgggcaggggagaaaagaagtgacactaggaagcattgtttccagggactaggaatagggaaggggctgtaggctgggtgaaaagttgaggtcagtctgagataatgacctgaccgaaccagtaggcccaccctgacacataccagagttacctcagagataaatgaccacaagccatgagtgaccacctgccgtgccaagtctgtgagtgatcagttcccggcacatttcctaacacagactgtgcctgagattgacatgctgtagtagagcgactttgccctgtgtgcctgtctgtgccttacacacaattctgtcccagcgtgtgtcatcctttatgacacttccctgattatgtgtctgtctcccttcagttgaatgtgagctccttgagggcaggaacctgcctttttatcaccagtgcctcctaggttgcttggcaatatcaggcactccataaatgtttcttgaatgaactaaagaaagaatgctttgtaagcagtctactactgagaagaaataaaatgaaaaggcaaaagttagtctttagaaaatgaatgcttccttttgccttaagggacggcaagtgttgagcttagcttgggatgtgtcctggcaggtttttagaggacttaatcatgagggtacaccccaaacataactgcatcaggaatgttaaaaaaaaaacaacaaccattttaagtgctttgcaggtgcttgtgacctgcatccctggctaaaaactggtgcctatacgtatctattaacataccacttaattttatgatttaggttaataaaagagcaacaaaatttccaggtataattaaatagttgagcatgacacttaactgatacaaatacacctcagctaaaagtggtaccgattcttaaaaggcacctggcatttcctcatatgccaaattgcaaaagcattataaatagacaccatataaaatatctctcctgccctagaatggcttcatgtcttcccacacaagttgacaaaaacattctgttattcagttttcttgtctttttggaaatgaactcactgctcacttgtcatttcaacacactttcttttgcttctgcaggtctgttattgtagagatgaggatgcccataggctgcgctgagtgagattcacctgggttactgcctaagtcagggaaccttcacttttaagagatagaaataactcacttaaagaaaaggaatatttactggcttggttatgtattaaccattcaacaagtatggattgagcctctaagtgtgtgtcagctatggtgatgcagtggtaaacaagacagtctcctgccttgggatgttcaggatgaccttgcttcagctgtaattgttttctgaggctaaataatgttatcaagcctctctctctctttcttcccccttccccactccatctttttggttcttttagcctctgtttctcttcgtacattggccttattctctcctgtcctagaaagactgtcttcaagtagtgggaaaggaagccccccactggtagctccccttccaaaaggaagaaaggtctgcacccttcaccccagaatccttgtctcatgcctagtggaagggttctgattcatcctgctctggcttagtcctccctgtgcccaacccttaaccccagggcagagatgccaagcttggccaggccacgccccagggccccacttacggtcatgaagtgggcagcagtcccacagaccatgttggtgtgggtgagggatctttccacaatataaagagagagttttaggcccccaaaatgatgtccaatacaccatgtgtgagattttagggaggaaaacgttagggaaatgtgaacattttcttgccaagatctgactaaatgtagcttaatgttagattattgaaacattgtttttgatacaccaggaattcagtaacttctatgagataatttgaaatcagttggggaaatccagtgtgaatttcctacttattttgatgtaaccgtcacgaggtgcacggcaaaagatcagaaatagaacggcagactttttatgattggctggggtgagcaacgtagcatttgagtatagtcacttctctgcaccagcaggtggggtcagaggtagaaggaggggaatgggctaaaacaatgcacttatagaagaaaaagcactgcactgattcctctaggggtcattctggaaaagtctcaattacagaactaggtgtgagtgcagagagtggtggtgaggaaaaataaaatgatattgtgaagcaaagcactaattcagcagttgaaacttcagtgataccaggcagtgagtgtaagagaagaacagggaggatgatagtttttgtgaagggtataagaagagaaagaatgaggacaagattgccgaagagaaattgcacagaaagataatgcatgggaagggaaaactgaataggaaaagacgacagggctaggatactggctaacagtgactgattattgatccacaccaggaaatgttctccatgtttgcatcaactattgtacttatagttcatagcaaccttctgaggtaggtatttgtaatattcacattttgcagagaggaagccaaggcttagagaggttaaggaacatgtccacagtcacacagctggtaagaattagagctgagattgggactcaggcagtctgggctcagcatctgtactcataaccacataaaaatgaaagaattcatagaagtgtaggggaaaaagaacacgacccacaaggctttgtcatagggccaaagatgtctttaaaggtggtgatgactagatatggaaccaaatacagggaggtaagtccatggaaacatgcatattatacaaatgatcaaagatgtcagtctggcttgcagtcagacaatgactcagctgttctaactaaagaagaggattactggtcaaaatgaaaatcttatagtttatgtatgacacagggtgtttaatgttattacttagaaaacctaattataattcatccctgtgtcctggttgagttattcctaaagacaactctccaaacaaaataaaaatggacagacaaaatatgcagttcaaggattttaaagaaatgttgtttgtatcagaaatatctgaatccagatcacaccatgactatttaggatttataaatatttattaaagccatattataacctttgcactgtgctaggcactgtaggaccaatggtgattaaggaagcattgtttctgcactcatgggacttatggtcaggactctagacagcctttgttctcactaacctggtatgtggcggggatgtctgtccacacagcactgtattctcgtaacctgtctgattgcctataagtgcaatgtacttatgcaatttttttgaacaataaaaaaatctaagtcattcagctaagataaaatgtaagtggaaagggcactgactttagagaaagaagatctaggtgtttttttgtttttgtttttgttttttttaatgtaacctgaaaaggttacttagccactctgaagaaattctaacttcacatggttttggtcagatttaaagagataatatgtaagagtacttcatagcctataaagatacataaacctttctgtaaataagttgtcattttaattataatttacagaaaatatgtttttgcctattttaaaggaattgttcagaaaatgttttattaaaactcacctgtgctttcaagatatagcagtaaaatacgctgtgggataggatatggaagtagaatgtctctatatcccaaaactgcattattaagaagaaaaaatactgatcctacattcatacgtacatatctaggaactctcagctgtctttctcccaccctgcaaactcaactgcattctttatagtcttacattctttcctcctacctcagcctatgaaggactttcctctaaaactttcccatctcaaggaacttatctgatcaaatgtcccctccttcaggcatccctatcactttctgcctcagcacacaagcatactcaagtgtcttccattaaataaaaaaaaaggcaaaccattccttgactttatattgtccctttagctgcagctttttctctttccttcccttcacagctaagtgtctcgatagattcctttacgtatattctcctcctttttcacctcctgttcattcttaaactcatcaaaatcttgaaactgccagattattctggaaaaggtaaccaatgaccaccttgtcattaaagtctgtggataccttatatttacttcatgtgatttctctgtggagttcaaggacagagtgaatttgaggcacttttggaacttttatatggagatgtggataggtatttgcatttgcagacctagagctaagaagagaagtctggcctcctaagatagatagatttgggagtcttcagtgaagccatggaacatgtagtacaagaagaaaaaggctgaagaaaggaatcatgaggtttaccaacgtttaagagatcagcaaaggaagaacaatccatgaacaaacttgagaaggaggatatgatgatttaaaaatacacctttaataccctttgatattttggtatgcttcctttcaatagatggatcttactctccccttgcatgtgggctggactttgtgacttgattttaaacagctgaataactcaagtgttgctaagtgacttcaggggctgtacatgtaaagaattgcatttgccttgctttctcaatctcagaatcagttagtctaaagccagccaccatgttgtgaggatactcaagcagccctgtggataggccatctggaaaggaaacaacacgctttcaagatgcattagccgcctgggaagcagatcttcctgcttcagctaagactggaacctcctgatcccaggcctccagtctttaagtctttcagctgagagtcgagagataacaggaagaaacaaaccatccctgctgtgtgctgtttgaatatttgacccacagaaaccatgaaataataattactgtttcaaatcactgaatgttggggtgatttgttattgtagcaatagataattaaaacagaggatctagaatggcagtagaggcattaggagagtttggtgagatgaatttataaaaaacctacttgttctattattaattactgagggacatccagtgactccctgtatttctctttttattacacttttaaaaattgagatgtcattgtatacaataacatgcacagatcataagtgttgttcaatgacttttgacaactaagacccatatgatcaccaaagatacagaagacttacttccatcacccagaaagtcacctcttactcctttcgagacaattctctcatcccaactcctcaatcactttttaaattaccatagattcattttgccttctaaaacttttatacaaatggaattatgcagtatgtattattttgtgtctggtttctttcactcagcacactgttaatgagatttatccaagtcattgcctgcatcaatagttcaccccttttcttattagcaagtggtattccactgtatggatatgccacaatttgtttatccattcttctcctgtatttctcaattaaaataaatttagttatttctacagtatcatatgcagtggaaaaatcaaaattacatgtagaaaaatttggtattataaaaagcaccttaaaaataggtgaaatgcatgattaaatgattgaaatttatcacctctatagccctccagagaatgaaaaagttaagccaggtatggtggcatgtgcctatagtcctagctgctcaggaagctgagctgggaggtttgtttgagcacaggtttgagtccagcctgtgcaacatagtgagaccccatctccagggaagaaagagagagagagagaatgagaaagtcataagccctttgttgaccataaagattgcattgtccatatgatatttaacttgaaaatacaaacttgcaagcaaaaattataaatgggtcaattctgctgagaaaaaaattaagcccaaaggcacatttagaattaatgacataggaataaagaaaataaaaaaaataggagttgctttaatttgttctacacacacacacacacacacacacacacacacacacacacaaatacacacacagaggtcagcaatatccctagagtcattttaggtatggcggccagcaaggcatatgggggcagtggtcctgcatatcacaaatgaattcccaattgttttctgcagagtatttgatacttctttaaatcaaatctaattgaacatttcagatagatttagttacatatgaaaaagacttgatatagaccttggaaatgtaataatttttttctgaaatccttttttgttcttggggaatgtaagatcatgtgtttgagaatatgttggtttaaagattatttctagttgggtttcctaagacattttgttaatcacactagttttaaagagttatcatcttccccgttctgaacttctgatgcataaatacttcaaaataatgttaagtttgagatagtctgcaaagatagagatactggcttgattttgttttctcccccaagaggatcaaaataatctaaaccatatattaactactgtcctgcaatttctaatttacaatctttgtcagttttgaattatggaagcagccaagagtatccaaaaacattttgtttctactgcgccttttttcccggtaatataaatatctgaagaggttattgcttaacctataaaatagtgacatcataatttatgaatactgaaaaacccagttcatttctgttaaactctatgatgagctagacgtgatgattttttctcagtggaaaggacatgtaaaaggaagagttttctttgttgtatccttaatgacagtcttatctattttagccttgattactctctatcactatttgacagtaacttttctttgtttctactttcaaatatcaattaagtgaaaatgacatcctcgtcactatcatcttatgttattaccaaagaccaggcctcctcaaacacagattcaaccatgctgttgggaagctgagcaggtgtgagtttccctagaccaccaaaggctgaaaattgtagtctgcagttgtaatcagactagaagaatttcagtgcgtctgggatgttgttcatttacattgctttcatttgtaatgtgtctcagtgaggcaatcaaaagtaagcttttttaaaaagtatatatgtacaactgttttacaactgtaagccactagtctgaaactcagaagacaaatgtatagcaatatcctactatcttgtttgactatttaaacttacatataatttaaggttttgaggaaaaggctaaaaatgtttcacttttaattgcatgacaatttggcagtatggtcagcaaatagaacttgtatctagttataaactagtactaataggaataatggtctccactgactattaaatatatactatggtgatgaatcaagatatttttgtaaagtactcatctctaggtctaagtttgtaattcactgtattatagatactatgctacccatgataattaaattgtttaaaatcacaatttaaacagtctagccacttgtttgcctataggcaatatacatacaggaagtaattaataaagcagttaatcctttagaccattggctttggagttcacatctggttccacttacccccattcataagtaggctagtgactttaatccaattacttaataattctgatactcaaattttttcatctttaaaagtggaaactataattataaggtggttataaggggtgacaataaaatatgtaaagcacctgtcatgtgtttgttacagaatactcagtaataggtagctatattgttaataacaatacatacttgattccaggtagtcaattgactttctataaatatttaccatatttccataggaaaaccaagcattttgttgttttgtcatttgggttcttctcagtcaggcccaagtcaggtgggtgtcctggtataacgccagtttttatttgtctgttcacaatagaaagcccttgtggtgtgatggccccaaagctgaccataaacttgcctcagccactctgtttttctggtaagagtgagtgctatttctactgcctctgcatggaactgggatgtgtggtttagattctgttttctaagcaaatgtatttgttccctgaaccattatttttctcactggtccagatggaaggcataaggagaacacctaagttcataaaataagtaagggtgaagtacatactttttgtcttcaaagttacttttgtggggacttggcagtttacaaaaagagctgatgatgattagtttctaattctaaagcaaacagcagggaattggattttctttaaattttccaatagcaaacaagctaggagtagcctttatcctaacatcttggcaacatcacttatttttgaatatagctttctgaatgttacaatgaccataccaaaggagatataaatacccccaaagtgatgggatcattttttagtggtttcgctgaaatttgctctaagtgctactgagtagaggtatgcgggaataagaataatcagttttattgatttcttctgtgactctgggccaggaccaagtctattttgaacatctttatatcctagcacattgtaggtgctttaaaaataactcttaaatattgactgagtaaaagcgtctatctctaagatggtcaatccaatccccctaagcactgttgtggagatgagtgaagactaactaggagtcttgctctgtcgcccaggctggagtgcagtgccatgatcacggctcactacaacctctgcctcccaggttcaagcgattctcctgcctcagcctcccgagtagctgagactacaggtgcgtgccaccacgcctgtctaatttttgtagttttagtggagacggggtttcaccatgttggccaggctagtcttgaactcctgaccttgtgatccgcccacctcggcctcccaaagtgttgggattacaggcgtgagccaacagagcttttaaaaacaaatacacgtgagaggccgggtgcatggtggctcacgcctgtaattccagcactttgggaagctgaagcagcaggatcccttgaagccaggagttcaagaccagtttggacaacataatgagatcccatctctatgaaaaaaattttaaaaaattagccagatgtggtggtgattgcctgtagtcccagccacttggagactgaggagagagaagctgttgagtccaggagtctgaggctgcagtgagctaggatggtgacaatgcactccagcctgggcaacacagtgagcccctgtttggaaaataataataataattaataacatatgtgaaagagagttcacaattagtccaatatctttagaaagattcaaaaacacctaaatgcgaaaaatgcctttattcatttgtcagctggattacagaaagtaggaagaaaagagcctgtgcctctgtaggaaagtaacaacgacttaacttctggaaatgacttcgcagcttagagcccagcagtgcctattttggattaaactgtgtattaattaagctcaaacgatttcaacattcatcaccttgcattgcacttcacagaaagcaaaaccaaaacaatcctggagttttgagtgaggaaaacagacgccccgcactcgcacacgcgcgcactcgcagcctgtctgaagtgcagaggttcaggcggccaagggacccgcgccggtttccgcgggcgacctgcaaatcctgcccggggcccggcaggcgctgcgtcccggcgcgttggcagttggcgacccccctcgaatcccccctctgctgcgggctccccgtggcctttggaggctcggtgagtcggctccaaatgttttccatatttgttcagcctccataattcgaataccagggcaggccgagccagccgtgcgccgcgctccagggcccagggcgccgcacacgcacccacccacccacccagcctcgcagcgccatgggcaagaacaagcagccacgcggccagcagaggcaggggggcccgccggccgcggacgccgctgggcccgacgacatggagccgaagaagggcacgggggcccccaaggagtgcggggaggaggagccccggacctgctgcggctgccggttcccgctgctgctcgccctgctgcagctggccctgggcatcgccgtgaccgtggtgggcttcctcatggcgagcatcagctcctccctgctagtcagggacactccattttgggctgggatcattgtaagcatcaagtctgttttgcctaagcgcgtttgccaaacaggaatgcgaagtcgcatggtcgagttgagactaacccagctgcatgtgcccttccccgggttcactcttctaactcgcgctctgctcggtgactgatgcgtggggcactgggttttcccgggcggggcagggctggacgcgatagggctcctgcccctctcctgctcgcggctcccagcgcctccacggggcctgactctgacgctctggagctggggagttcatttcaaaagctgcttattttggtcagactgaacagcctcaataacaacagcggattcattcgggctttttccttatcctgttacccagaccccacccctgtccttaaacaagtggcaaaaagtgaattaagttcatctagtgaaagcaggagaggagaaagcctgtacttggagttgccacattgagtagcattcattttatgttttaaactgaggctccattagtaagtttcctgaaatgatgggctaaggcaggaaatgcgaatacagcaagcacagccttaatccactggagtctaaagtgggataaacccagggcgctggccatggcagaagtatatttgggactccaccgatggatgtactgttctaagttgaacagtactcagctgttgtgagtgttgaaacatgtagcatacttggcttgattaaatgaattctttaatgtaaaacgggtgccacttactgaatacctactgtgtgctcgccctgctagaggcctgacacatattatttctaatccccacatcgtcctgatgggatcgttttaatcattctcacttctcaaatgagggaacccaggccagactcacccagggtcatgagtgggtaaagcattcagccatgctgattcctctttatgctagactatatctgcgttttcctcattgaaccacactgccaccacatttggtttgtaactttaatattatgttatattacagtgtcttgtagcatattaaactctttcacatgcattatttcatttgagccacgaaacaacactttgaagtgggaactgttattccttttggatgtgaggaaataggctaagagaagttagatgacattctcaagcccagagattgaatgtggtcgaatcaagagagactagaaatgacatttttgactccttgtctcatattgcatccttactgctattactgaccacaggaactgtaactcacaaaacgtccctcaaaataattttgtatcagggacagacattagagagacctgatatatatgcatcgatggaggtatttcctaattaagattatttgaatacacaatttttgcatagtaatttaaaactttaatttttgtactaagaattcccatgaaattaccatgattggagttttctaaatcaagtgattttaaaaatagcttttcagtaagatatactgggtatttcaggcacctcaatgacgatccacatacccagggggaaaatatgtctgtcctttaatgccaggggaattaaaacaaacaaagaatgaagctctttcattcagtgtttttaaatatcatttgcaaatgtgttccccatccttcctttattgcagcttcaaaagctcagcaccaaagaggcaaattagatggagaaaaaacttattttagggtttaaggcatgaacataaaaaccatgcaactcagaaattttatgaactaaagctcctgtgggagatgatgttcctaattgccctggaagctccctgggtgttgcacaaagggcattatatacagccaggtctctgctctttctggttttcttttttatcatctaggattcatttgaagtttgctctcagtacatagccctgatgaaatctgtcatcttagattttctttcaactgagaatctatgtagaggagagcagctagtagagatgtcctgagactagtgaggagggtctctgaggagccaggccaggaacaactctcatcctagcagggccagaatttgggcatgtgtcactgtctcacacagacaccatgctctgcttgtcctcactactctgtctgtggttggtcacagggcactcttccaagctttcagggaagggaaaagataacgaggcagatggcaaagtgcagatgtgtacacaccacacctggtgttgagcaccagctcagccactgtgtgctgaataactttgagttttgggggggggtttttggagacagagacttgctctgtcgcccaggctagaatgcagtggcacgattttggttcactgcaacctccccctcccaggttcaagacgttctcgtgcctcagcctcctaagtagctggaattacaggcgtgcaccgccacacctaacttgtgtgccaaataacttgtatgctaacttgtgtgccgaataactttggacaagttacttaacttctctaggtttccatttctttactaacaaaatcagaatgataataattcctaccttttcgggttgccctgaggatgaaataaattaatacatgtaaagcacttaaaatagtgccaacgaatggcatgattcaatgagttagctttacttattagctgcttgggaagcagtcacaggcagtgtcactcttcagaggaaaggtggctttatttcatctctagacttgcaaaactatcatttttgactcgctacatttccaagactagtttgaaccctgaagaaaatatcagttttgccgtctcacctttctctgttctcagccaagttactctttagcaatcacagtggtatttgattggtccagtactttctgaatctttctggaggtttataaaaatgaacttggaggagagtggcctccccaaggtcatttttcctttgggatatgcagtgattcagggctggtatatcctgccgggttatatcagttttccctgttcaggagccccaccaaaccgaagcaatccaggcccatccctggggctgaggctgagtcacactggctccgggatataggctgaagccaagctgagtgaggcacccacgctgtctacaactttccatgcttcattcttctgtttccctttattctggttgcctcttctcatgtggtcatcacttcattttacaggggccactatcccattaacttggaatttggggattgccatttccttaacagaacctggatatatgggtaaatccacttaggtgacttctctttgaccaatgcctgggtgacttgatgaatattcaaggtgtggttacagactaaagaggcccttggtgatctatgatcagaaatttatgtccagtgggattttaggaaaacaaataggtcattttttatctatccataaatgtgactccaatccccaatcaaaagatgattgaagtctttttactttgattacaaaagattcctgtaaggggggaaaaaaacccagaatggagtcactgtggagactacgtaacctgtaaaagtgctgttcatgtattataattctttatagatggtttgagggttgtaagtcataccgcaatgacaaaacaaagtgaaatagcaacttttgaggatgcacttggctgggtacagaggatcctaggacagagaagtgtgttctgcattttattctgttaatggctttagtagctaagtcagatgggaattcaagcttgctcatttttctggaattcttattgatgaaaaatgtgtaaggattgaagtaatctaaggactttggggattttacttctcactcaaatgaatacaggtttagtttaggtaaagcattgcatgcttaacgtttggttttcccttcctcattcagtaacatctgtggagggtgtctgctgtgctacgcattggcctaaaaataatgaatcaactacctggaggagatctccagatcctgatggacatgtgcccttattatatctgacagtaatgaatacttccgattagaaaatttaacgtacacaaatatttttaagatccatttacctttcaaagtattccacttgcagtgatttatttgctttggcatctctactctgaagtcaatttaagtgcaaactcttgcttctcatccccagtgaatatgtttagtattcgatattctcctggcccttgtagggaatattcccatggaaagtgagaatttctttgccttattatgctttttagcttcccccactctccctccattgctcccataccccactcagtggagtaaaaaccctgagataaatactgcattaatcacattggaaagtttaaggcaagggcttaaaagaaagggaagaatatttcctttatttaatgtcatttgtaaaactcatcacatgaatctgtaatgattaaaagtcatgtcaaaaatttcagtaacagttttcgtatgttaacttatcctaagaaattcaagttgcaggtttattcaggttttaaaaaccgattttaagtcttgccttaatggaagggaaaattgggtggttatttattttaaagcagaatataccatgaaactcacaagcagacatatcacatatagcaaataaggaacaaatatagttgttattcagaatttataagtagggaaagtaagataataatttagctaaatggtttgatcatggttatgaaaagtaactggaagagagaaaggtttggcattagggtataggataaaccctcaagtcaagaagctaaatgtggtgttaactttctatagagttgtattgacatttgaaaattttaatctggaattatacttttaggagtatactgcatagtaatacattattcatcatattgggactttaatatgcttccaaaatataatgtcgcatccctggtatccctgggaaataatttttattatggcaactgccacaggattgttaggaactgaggagagataattacatggcccaactcaatctccactgaatacatagaacaataatgacaggaaaattattgtataggcataggaagttctcatagtaagtataaaaatggaatgcaattgaattattctggcaaaagaagttaatttgtgtatatatatatatatatatatatatatatatatattatatatatatatttggaaataaaatggaatattcaagaatttggtgaggccgggcatggtgtcttacacctgtaatcctggcactttgggaggccaaggcaggcaaattgcatgagctcaggattttgagaccagcctggtcaacatggcaatatcccatctctaccaaaaatacaaaaatttagctgggtgtggtggcacccacctgtagtcccagctactcgggaggctgaggtgggaggatcacttcagcctgggaggcagaggttgcagtgagctgagattgcaccactgcactccagcctgggcaacagagtgagaccccataacagaaaaaaaaaaaaagaatttggcgaatttggcgaaatgtttcctgaaataatttcagtaatagaataaagaataagataggttaagattgaacaaaatcattagatgttcagaatcagcaggagaaatgtgttttcgcctctacttacagccttctactaagcctgatgtgcaaaggccaagagagtgtttatataatgaggaaattgtccctaaatcttcttttttaaaaaaaaaaatgaggagaagcagcaggttctaatattttttttaatcctgtattgtggatatattcaactcagaaagttagtctctggaagcttttgagatgtcagtcatcattttggatttaattttttgatagaaatactggtacatagaattttgggataatcaaatgaaaaataaaataatttattctcttactttaagtaatattctcagggccactatatatcccctgacacataatggataattaataaatgttgaactgaaatctatttattccatacttgccattatcagagcttctgtttgaacatgcatatgcccatttttaagctatattcagtcatcccttagtatctgcaggggattggtactgggactcctgataccaaaattcacagatactcaagtccctgctataaaatggtgtagtatttgcatataatttatgcacatcctacatatgctttaaatcatttctagattacttataatacctaatacaatataaatactatgtaaacagttgacacactatattattgagggaataatgacatgaaaaggtctgtacatgttcagtacagacacaaccatcctttttttatccaaatgtttttgatccgtggttgattatattcatggatatggaacccattgatacagagggctgactgtagttgtatattcaaacacagacaaatttatttatgacatttaagacaactatgaggtaatagtaaggaatgtgttattactccattttggcttctggattctagaagaattcagaacatattaacttaacattacttagattttttatttcatgttataaaatggcaggactcaggaaggtcatttgacttatatgcactctcctaactagaataggacatattaggattgatgtggctgaatgctagatgttgatattaccactcttaaccttttacgaagaaaacaatggcataggtttctctaatgtttggtctaacagttgaatagatagattgccaatatgatgccctctttcagtgtggtctgagaaaatgggtgttttctagatttgctcttgcctttagctgtatctgagacatttctattaaggatggtctttcactggatccacttggttgtattgtggcctgaagggttaatgataacattaaaaggaaacacataaggttatgttgaagagttcagcatatatgtttctatgttactgtaggatagtgtattagtctgttctcacgctgctataaagatactacgtgagactaatttataaagaaaggaggtttaattgactgacaattccacatggctgaggaggcctcaggaaacttacaatcatggcagaaggcaaaggagaagcaaatcatatcttacagggctgcaggagagagagcactggggaaactgccacttataagccatcagatctcatgagaactcactatctcatcttctcatgagaagagcatagggggaaccacccccatgatcaaaccaccttccaccaggtttccccctcaacacatggggattacaattcaagagagatttgggtggggacacagaatcaaaccatatcagacaggaatgtaatctagtcattaaactttaattaggtataattcactgcaaaatgcagttcatttttaggtcttccatcctggcaaactaaggaagtactggtcaaaaaatgtccatcaaaatccagagctggatgggacctcatgatgtcatagtttaaccttccagttattatttgctgtaaatgttcaagtctaggtttatcacgatgagttcataagcttacagtgaacttcttttaaaaaaatagatgctaggaacaggctttacagcataagctatataaaaacctattccataggcacaccctctttcagatgctttggatgcagtctcagatctctgtgtattgagataaaacttggcaagagtaactgtcagatgcctgagtgaagcagctcactccatcaccctggttaattttaaaattcatatgtgtacacctacacatatggcattaactaaaatacatttttctttctgtcttagtcggctcaggctgctataacaaaataccgtagactgggtgacttaaacagcaaacattcattttctcacagttctggagacgggaagtccaagatcagggtgtcaacatggtcaggggctagggagggttctcttcctggcttgcaggcggctgccttcttgctgtgtgctcacatggtcttttctcagttcatgcatgtgaagagaagaagagatctctttctcttcctcttctcatgaatcctccagtcctgttggattaggaccccatgcttaggatcttatttaaccttaattacctcctaaaagccctatctccaaatatagttacttttgaggttacagcttcaacatatgacttacggggacacaattcagtccatagcatttccggtgagggttatacatttgcacagcaacctcagtgactcttaagctcgttttacagcttattattgaaagccctacggctttcttggaacagctagaagtctgagtgtttccgaggggtattctgagcccgtaatctgacacacggaggtacgatggggtggcgcggctccgtgctcatgccagtagtgagacatatggaggaagctgttttcattgcatttacagattgcttcttttgtcaaatttctgtaaaaataaaatcaagtaaatctagctagtgaatacaattctaaggttaacttaggcatttcctttgctgcattaactctttaaggcttaggaacctccacgctgtaaattcctgcatttctttatgctccagggagtatcctgatgtcaagatgtagctcaaggatactttggcttctgatgcaaaggtggctggctgagtggtaccattggggaatgcttatatgttcagccattgaccaagcctgctgtcctgtggggggtggtgattgcatactgtgggcaccccccacccgccctttgagccttatgaggtaatagcctttagtaggtgccttcactctttggtagatcttcattttgacacacatttaagggcttctcattggattctgttccctcacttaagaagtcctgagctgggctctgcttttccttcactaagtactgtattgcacaaacccaagccacccaagagggaaagaccagggaagactaaaacatgcagcctttcataacaattggtccaatctcagttccaaaacgaaaagggatggccacgatgggatactgtaagctctccagtttgatttttgagcatatttaaagttgatgctctctgagctaatgttgctagagccacggtccctaattgtgaatttcataaatgtgagtgtttcattatggtgtttcctggggctggcaaaagtccagtaagtgacgggacgttggaaagcagacagtttgttcacaaatgagcattctcagattctgctgaagaagttctgttggacctgcttctaatctttgcagaaatgagcaactctcccctggctgggagtgccgtggtactgagagaggtggtgagaaacctggaggaagcgcttttaagtggcattctactcagttgtttttaaagcgttagattcagcattcactgtaaggagcaattaaaaacccctttaagatatgttattatcaagccctctctcttgtatggaagataatgacaggagaccagaaaagggggagggggctgctaatgtgttaactagactttgacgagcgagagaattttagctttattactaagtgggggaaaaaacacttccttggctggcttccttctaaagtatcaggtgtggcatgcatatcaggccattagcctgatctcacaggcttagccctatctcacatttagctatgccaggaaagctatgaaggaggcattttctaagacaagggcaacagcatttcagtcctcatcaattctgttggaggttggaggtgctcttctctcagggagaaacttgcaggaggactgtgcctacctcaggaagatagtggggcacccaaggcagtgaagagggcaaactcggactccctaaggcaaatgtatgatcataaatgagaagggatttcttcatgaccgcatacagaattctgtgtacagagtttgaatcttttagtttatgagttacatgttcaataagtttatgtacttctcccaggctctttggtagtcaggttctgaaacagaaggaccaaacccacacaggttggctttgtctcataatctttccatgaacaagtagtttgagaagcctcttaaagggcttcggtgtgcattaagggcttgagaccaactaggaatttttaaatgcacatagggtgaccgtaactattgtgttatagaaccctcaagaaagaattcttcttcagtcaccaaatcgtgtgcgtcacaaatttttccacctcaagacctccctgaagctttgctccccttctctctgtcctcacacacacatcacaaaaagctcagtgtctggctaacccgtgttgccatgggaggcgagggggaaatgtaggagaggctgcaggctgcttggggacactgacctcctcatgttgaaaaggacaaaacactttcaaaggagaagtaatattataatatatattactttatgttccctcatactgtttttcataaagtactctcaattagaaaagccacttgataatatttttaaaggttgaacaagatggttctctcatttacaatcccattccaatgttacataattcaatttatattgatttactgtataatttctatgcactgtgctatttaatatgtttatatttattgtactattcaacatatatgaacccaggagtttaatatagaattatctctgcagtcatttctagaatgggacctaatttgagaactgacttaattatggctaagtaatgaaatccagcccatgactataccaccggagtaggctcaatccacatcagcaagattcctttccctcttctgagggcttgaaaatccccaagtgaaacaaataaactataggttgtttatttcttcccacaaatactgtttgtaacaattctgcccctcctgttgattcatgagaaaggctggaacacaatctttgattctcttacattctttggaaattgattattttgcaagaataagtatttatagaacttggtgattagtttttggtaagtcatcacaagagttagttaggagtagaagccacaccctagccactctccctctgtattttcatataccaggtatggtgcccccaagagcttagtctctgggtgaggaaacacaggtacaactaactgcaatttagttttaaaaacaaaatgccaaggtggtgccttaaacaatgtaccgtgctagcgcagagaagaacatgatgaaccctcagggtaagatcagaaaaagaaaggagagggggtctgaaatttgaggaatgactccagctttggagtaagggtagaattctggctctactaatgtagaatcattttccaaaaaatatttggtaatgatttttaaattttcatttctatgtgaatttgaacaaatgtcagtaattctgtgcaattctatgctttttaaaattataaacatttcaattgcataataacatagaaaataatgcataataacatagaaaaaaatgcccacttatccattcctagctttgctaaattttagtattttgtaataattgcttttttattattttttaagaaaggaaacattacattgtattgaagtctcccatgtttcatttcttaatcaaattcccctacccctcccatcttccccagagatatgtactatcctgaatttggtattttttatgcataagcctgttttcatactttgaaaatttgtatatatccataaccaacatgtcatattttaatttttatacagatggtatcatatcatttctgctcaacatcgtttttgagatttatttataatagtacacagatatcattcattcatgtttgctatactgaatttcactgttaggaatatacaacattggccaggtacagtggctcacacctgtaatcccagcactttgggaggccaaggcgggaggattgcttgagcctaggagttcaagcctgggcaacatggcaaaaccccgtctctacaaaaaatactttttgtagagaaattagctgggtgtggtggcagatgcctgttgttccagctactcaggaggctgaggtgggaggatcatttgaacctgggaggttgagacagtggtgagccatgatcgcaccaccgcacttcagcctgggcaacagagcaagaccctgtctcaaaagaaagtggtggtggtgggggggggggatatataacagttaattcattctcttgttgaagaaaatttgttttcaaaaatgattttttattttgcatttacggtgttacagtggatattcttgtctataactccctgtgcacataaagtcttgttaaggcatattcctagaagtcaaattgttgggtcataagatatagacatcgtcaaattactagctattgccaagtcactaccacaaatccaaattggactaacttacacctcacctccaccagtggtaaatcagagttctttacctatcttatttgtgtgcaatggtatcttgttttaatttgcattttggtgttgctactggaattgaacatattttatgttgattggccattttattttgtgttctatcatttatttattcaaaaaatattttctatgggttgttcgtttcttatttatttataggatttgttacttttgttacttaatctttatggttttaggtactacaaatatctttttctggttggtatcatatcttttatttatggtgttttgttatgaaaaaagatttaatcttcatatatttatatttatcagttcttttttttatggatttgatgtagtttaaagaaatttttccctactccaaggccataaaaatatttttctataccattttctaaaaatgttaaaggtttgcttttgggtattcatatctttattataagtggtttctttttgcaatgatgtgaagggtccatacattttttctcacatggattgataattgttttagcaccgtttaataaataatcggtccctttcatagtgatctgttacacccatttatcatctgtcaagtttccatattagatttgctttgtgattttccttagttctattgttttatttggctatcactatgccaataccattgtctaaattaaaatgatgctataatgcatcttgttataaagatgatggataagcagcccacccccaacccaccctccttcattttattcttcttcaaaattttctcagtgaatcttagccattttctcttgcatatacactttagaataggcttttcaagttccaagaaaaatacttttggtaatttcctgggatttgtactttctatacatgaccaaagatgatctcaccatttatttgagtcttctctaatgtcttttatctggtcttttgattattgagttcactttagttgctttgtgctcagttcatgtgtttttcatatcaattatttgatatttgattagacttattttgtgaccaatcttcataaacagttcttgaatgcttgggaaaaatgtggattctctcattttggggtttagggttctatactcaattttaaaattaagtttgttccctttgcctggaattgctgtcagatgtatatttagaatcttcttattctccctccatatttcttatcctgtctagtatgtttcatctctctttatctctctgtgctgtatcttgggttattttctcagattttctggttcacttttcccttcttcatttaggtttaatctgccttttacttgtcctttgagtttttactgccagcaattttaatttttcattctagaactcactgatgttgttactgatgttattttcacatatccctggtgctttaaaaactgtcctgttctttatgttttcagttccttccttcatgtgtttgttttgaatgtactttttataggctctgctcattacttccattatttggaattcttatagctctgattcttagagcgtgtgtgtgtgtgtgtgtgtgtgtgtgtgtgtgtgtgtgtgtgtacatgcatgtaagagctagccttcactaataattaattcttcaagtgtttgctaattttggtttgtgagttcatcttccaagaggctttatgtatgataacttgatatagcctatttgagagtacaacccttccagatgggtttgtcttgccatatgtcccagtgatgttacaggcctagaaccactttgtttccttaacttacttattatgaaaaatttcaagcatacacaagagtagatacaattgtataatgaacctctatattctcatcaccgagccttgataactatcaactcatgctcaatcttgtcttatctgtatgctcctatatttcctccacacccacacactacacacactacacagtggattattttgcactaaatcccagactttatatcattttatttataaatattttgctatgtaagtcgaaagatgaagactaaaaaataatcaatatactaataatacacctaacaagttaatttcttaatagaatcaaaccactgtttaaatatccatgattaactcattaatagttcctcctagatttgtcaaaatcaggatctcaataagatctatacactgcagttgactcatatatttctaacatttcctttactcaaaaatttaccctttgtctctcctttctattctctctctctgtgtctctctctctctgtctctgtctctctcccccttacaatttatttattgaaatagccaggttttggtttattttttcaggatcactttcatgttactttctcatcttaataggttccaggactaggaaagtagtagaaaaacctcaaactgcccccctgcatctgttgagacagaacaattttcttgatgacttccagtgctagtgggctaattgttttttcattttataagggatgctacgttttatccagcattttacagtgttttatagggagagagttttcctataatttagtccttaatattatgcagaaatgaaaccttttgatgctttttagaaatttattttggatcaacttgcaagtttcttatcctttctgagctgcaagtttctataaaatagagtaatattttttactttattgcattgtttgggggaaaatgagctaatgtataaaaagtaaggaatacgaaaaaggtacactttgtgggtagtgggaatagctgagcaggatttgacgaataagtgtgagtgaattcaagatggttgaaagagtagtaccattacactgggtagataaggaaagaaaagcacattttaggtcaaaggaacaagtcatgtcctatgactgttcagcccagttttcatccataatcaactttattgcttcacaattctgttggttatgcttattttgtcttttgaggatataactgcaagaattcccagcagttcctatcaaatatgaatcttaacccacatacacaaatttgtgttataatatgaaaatgagacccaaaccaaagtgattctatttgaagatctccatggtaagtcatacactgggatagctgtcagatttctcttcttggttttctgtaaattgatgaaacactcagccttgggttcactggtttaaaatgatgagctatttgcaattgtttcaagcaaggtttttggaacttttgaattgtagtcactttgtgctggcacacgtcttacagatcttcctagctttccagcctcactttggcaggaacatcaaagaaagcacactatatccataagatttgggggattcacactcctctcatccagctgctggtcacaagttccaactcatttttatcagttccattgggtggttttctaatatcctataaagcaacataggagatacaagtgaacatctgcaaagcacagtgtgtgctgagaaacagggcagtcacttaacaagcacatttttcttcccactctttctgtgcttggacaacagatctggctaaactacacagcaatgcaaattacaatgtaactttggtgggaaaaattatataaaattctagttatcaagtagtttcaaacaatgacaaaacctaccactttgaattagaaagcatgtatctagccatacaaagcgctttggcttggcacataagtattccatacttctttaccaaccaatcagaacttttatcacaaagtactggtgaatccattctcatttctggcaaatgcatgagcaaaattttcttaagaaaattgcccataaattcttagatattttgtttttacaatgtgttttccaaagagatctaaatttaacaaagttgtaggtgaggaagccctgcttttgcattataatttaattaattagcatttatttttgtttactttgaatgtctttgcatgctcatatgaaaatacatacatttacaataattcagatgtagacctgtcagatatcaactcctcaggtagaatgacagttaaaataataaaggggtggatgttaaacatgagctagacttaggtgtgattgagcaagtgtcttttctctttagatcctgaaaggaaatacttttctgtgatagaatttcttgtctagaattgacttttccctgagaaattttgacctggatttttaccatcttcttttaaaaataatctcgcatgtcatctttgcaaagtcagtattacaaattgtttcccccaactccctggaaagatgtggaaatgaccagatgaggctctgtgtcgaaacccaaacccctcgtgggcaggcagaacttagttcttccataaataggatttctacactagagcttttcatcggcaacttttactctaatgaaaaaaaaaaagtaaaatcagtgaagctctggggttggcaatacctaagacaaatgaaaaggcattgaaaatcttccagatatatcataggccaaataaagtagtcattcgcaaagcttcctagacataaaaagttgttgctagctacgattttgttcacagtgaaaaagaagcttctattttgagcttggttagataaaatgaagaaaaaacttttttttcaaggttataattagtgctctgagttttaacgctggtccactaatgttagtgtttagagacagattgttacaatgcttccctcctcttggtggtcagttctgccgtaaactcttcgctttatatttgcgcccctattacttctggaattcgccatggatatctgcacactaagtttggctgaaacaattgtgttttttaaaaaagtaatattaacttgaggatctcatatggccagaaaaatagttttaattgaaaagcatttttttttccagaaattaaatgattgtcattgtaaaaccacagtagtgtaatcagagaaacatgcagctgggcatgggacatagttcctaagattggcatttcctgggtagtagattatatataggtttgtaacagaaataaaaagagtcaggaaaagaagttttataactcttaggtatttgcaaactatgttaacattgttggaaagatttttgaaaagtgggtccttgctatgaaagcaaaatatcatcctagagatgatgaaaccgaggctccaagggttaacttcatcagtcagctagaaagtggtggaggtgggttttgaaccatttcactagacccagagctaacatgcatgcaccaccttgttctctgtctttaggtatgtggcccattttgctgtaatacttcacagttcccttttgttgtcctttctcgggggcattcataggttgtctatgaatcctgtgaattcttagatacttatagtggatgcatgttgttgaaataacagagccagcaaggctctcaaacatctacttttttttaaagggttgctgggcattaccaattcattttttaagggagaacatatcactttaaggatttattatttgtattttactaatcactgtatgtcatgtttgttgggaaaagaagctatgatgataattgctacattctccatagctcttctcaacagctgacaggttatctatctacttatttgtttatggtctgcctctccactttagccccatcaaggtagggatttttctctcttcttttcactgtagtatctccaagcctcaaagagtacctggcacatggtagttacacaaggaatatttgttaaatgagcagaatgagacgatttctaagttgtgactgagtgcttatatttacatctgttattcattttcagcttgaatttgagcacagtttgagttcctgtgagatgggggaaaacacctactacaattccaggcacgttatttatgatatttaaaagccaattattaactgtcattttctccattttgtatgtgataagactgagtctcaatgactaagtcacggtcccccagcctgcatggtcatttggacctcaaagactttctttttcacactgccttaggattggtgcttcagcaattcaggagaggagcagatggtagaatgttcttcagatctctgcagttcttgcttatagtgctgtcaggattccttcaggcaggtggctgtaccatgcagtggctaagagccaggctctgcactctgacagcacagccatcaattctgtgatatacagtatatttgctatgtgaccatgacattattgtctccattttataggtagggaaactgaggctaaaaacaattaaacagctttgtccaagatcatttagctagcaaagtaatttgagtcaagatgcaaactttaatgcccatgttcttaccactgtgtaaccctgtctccttaattatgtgtatagttctatacttgattttacagaatcaaataagcagttatcatttattgaatgaactgttacttgatgtttcatgctttgcgccattttcacctttctcactttatccaattagggaaagagtacattttgtgttcctttatcttgcttttacctaaaaatataatgaaaaagaattaataataataataacaaatataggaaggggatatcattcataattctaccatatttaagccctatgtgattaacaccaaaaattttgcctttaaaaaaaaacacattgggggaagctgattcaatgcttcttacattataaaatggatgagggattttgataagtgatcagcaaggtgggggttgtataagctgctgtcagctgctcatattcacatctggcatggactggtcaaatgacattacccttggcaatacattttcctgtgcctcagttcctctggggattaaactgtgattttctaaagggcaaagaccatatcttcttctttatactcccggtccctaccacagtaaaggttgagctaaattctgttggagagtgatacctagattagggtggccattgatagcaagatctcaaagattatgctgtaaccattcttcctctattcccacaaatcaggaaataagtactatgatttctccttggcactctcctctgtatctttatacagattctgtaggctgattgtagggattccaagcaattagtaatgagtaatgtgccaaacttagatacaaaccaatctcacttgttaatgagatacttctgtcaaaagagggacccagaaaaggcagaaatggggtggaggtgcagaagcatgctggagcattgctgatggacttgtgacagctgattgcatgcatctcttcacaactttgctcagtgactttgtgttggttatcttgaaatcagccatggtagaagtagtcacaccatggaaattagcaaatgctacaaatagcctttctctaactggttgttagacatttaccatcacaccactggagaggtggtgcaattttagaggtgattgttttgctttgggttagagtggctgatgccccttaacaatagcagaatgccacatcacactgaatgatttagagatgttcctcaaaccaccagtcagatacattgaggaaacaggctctgcaatgaggtcatatttaaatagcaatgaagacatggggatttctcccccaatttgaaggactcctatgatagcagagactaaatttctttatggggaaacaaatggagccaacacctttataacacaatagtaatacaaacaattcaggggcaatgaatgtatatctagccttttacatttctaaaacatcagttttctctcccttgaaaaatgcattcttgagatgattaaatgcaagaatacatgtcaagtgttcagcacggggcttaacactctgtaaatattcataaatggtatattagtagtagtagtatattattgtttataataaatgactctctataagaaattctactagtcagtgtgtcactctggacccctaaccatttcgataaaccctacaccagacatcagcatttagaacactgggcttacagcttagcctagtggttctcaaaaggttcatcccagcaccggcagcatcagcatttcctgggaatttgttagaaatgcgaattgtcagtgatgatgagcattttttcatgtgttttttggctgcataaatgtcttcttttgagaagtgtctgttcatgtccttcgcccactttttgatggggttgtttgtttttttcttataaatttgtttgagttcattgtagattctggatattagccctttgtcagatgagtagcttgcaaaaattttctcccattctgtaggttgcctgttcactctgatggtagtttcttttgctgtgcagaagctctttagtttaattagatcccatttgtcaattttggcttttgttgccattgcttttggtgttttagacatgaagtccttgcccatgcctatgtcctgaatggtaatgcctaggttttcttctagggtttttatggttttaggtctaacatttaagtctttaatccatcttgaattgatttttgtataaggtgtaaggaagggatccagcttcagctttctacatatggctagccagttttcccagcaccatttattaaatagggaatcctttccccattgcttgtttttctcaggtttgtcaaagatcagatagttgtagatatgcggcgttatttctgagggctctgttctgttccattgatctatatctctgttttggtaccagtaccatgctgttttggttactgtagccttgtagtatagtttgaagtcaggtagtgtgatgcctccagctttgttcttttggcttaggattgacttggtgatgcgagctcttttttggttccatatgaactttaaagtagttttttccaattctgtgaagaaaggcattggtagcttgatggggatggcattgaatctgtaaattaccttgggcagtatggccattttcacgatattgattcttcctacccatgagcatggaatgttcttccatttgtttgtatcctcttttatttccttgagcagtggtttgtagttctccttgaagaggtccttcacgtcccttataagttggattcctaggtattttattctctttgaagcaattgtgaatgggagttcactcatgatttggctctctgtttgtctgttgttggtgtataagaatgcttgtgatttttgtacattgattttgtatcctgagactttgctgaagttgcttatcagcttaaggagattttgggctgagacaatggggttttctagatatacaatcatgtcgtctgcaaacagggacaatttgacttcctcttttcctaattgaataccctttatttccttctcctgcctaattgccctggccagaacttccaacactatgttgaataggagtggtgagagagggcatccctgtcttgtgccagttttcaaagggaatgcttccagtttttgcccattcagtatgatattggctgtgggtttgtcatagatagctcttattattttgaaatgcgtcccatcaatacctaatttattgagagtttttagcatgaaaggttgttgaattttgccaaaggctttttctgcatctattgagataatcatgtggagaaataggaacttttacactgttggtgggactgtaaactagttcaaccattgtggaagtcagtatggcgattcctcagggatctagaactggaaataccatttgacccagccatcccattactgggtatatactcaaaggactataaatcatgctgctataaagacacatgcacacgtatgtttattgtggcattattcacaatagcaaagacttggaaccaacccaaatgtccaacaatgatagactggattaagaaaatgtggcacatatacaccatggaatactatgcagccattaaaaatgatgagttcatgtcctttgtagggacatggatgaaattggaaatcatcattctcagtaaactatcgcaagaacaaaaaaccaaacaccgcatattctcactcataggtgggaattgaacaatgagatcacatggacacaggaaggggaatatcacactctggggactgttgtggggtggggggaggggggaggggggaggggggaggggggagggatagcatcgggagatatacctaatgctagatgacgagttagtgggtgcagcgcaccagcatggcacctgtatacatatgtaactaacctgcacaatgtgcacatgtaccctaaaacttaaagtataattaaaaaaaaaaaagaaatgcaaattgtcagtcctcaccccagacctattggatcaaaaattctgaggataagaccaatatttacccaccttttcaagtgatcctgaaccactcttaggctttgtcttaccataaggcagtggcaatgagaatccagtaaaaatgtttaagtcatgctaaaatattctctccagtctttctggaatcttgattggataagcagcctttaattgatccgtgtgaaatgttctgttgcatgtcatttaattttctggtctattatgtgttaacagtcctcctaagactatcctcaattaacagactgtaacatatttatcatttgttgaaaatcacttctaatactttatcttaatgtatattaaatagatgacaatccatagaaattctcttaagaaatatctggagaaacatttacagttctgctacttctcttggtgatcaattgattttgtaaacatgagaagagagttcatcttgttactatattgattggattaaagcactttaaatacaaaggtgaaagttgattaacttacagaaatagagtcccattgcaggtacacgatgaaacgggggtaaggaaggagaagaaaaacattgaaaggcatttgacagggtaaggttgtattccccagacaaccctgtcaagcagctctgttgacaacaaaaagaagaaaacaaataaattggaggttgtgtgaatgtcacaagaccagaatataaatacatatgacatggagagagtaaataccaataattctcattctcacaaaatgttttaggatgataccttccagctatgacaagaccaaaagggaaaaaaaataataagcaggtaaatctccgagacactggtccagtatctaccttttattcataatacaaaccctcaaaagacaccactgcagttataataggccaaataacaaagacaaagacaatgtgtgacaagactcaggactcgcacatccacaaaaaatggatttaacattcagagaccatttcagccctgtctaactttctagctcacaagagagaatgcagacttcactctgcatggacaaaaagatatcttcaggcagaatgtggaatttaggacttcagttttctcttcacgctaaaccaattgtagaaacacacatccaaaaataaagtgatgattaccgtctttcttttttccattaaaaatcactttaagcttttcttatcgacttaattatttacatgcacattgactaaatcttaacaagctcttaaatgctagttgccctgttgcctctcagcactagccttcccagtgccacacacgtgccatttgcctttgtgctctgtgacaccaccatctgggtgtctggtccaacaagcgccttcttgaaaaccttacataactccccttttcctgtgccatgggcttcacctcaccatatctaatgggagctctggcctggactctaggaatgtcattccagataggcctgacgggtctcactgcccattaacatgagctcccccttccctgctgggaagccagaatgccgtgtcttcctggcacgtccacgtcctgccaactcaggagacaaaaccattagtctaccatgagaaatctggttttctctccatggccagaaaaccttcagttttcagtaccagtaaagcctacccttctaaaacatgcttacactgaacatcaataaactctttgataaagaagtcttgttacaacatgcaaagctgtaggcaaaaaaaaaaaaaaaaaaaatgacagtcccctctcaccttagaacatatcaagccctatcagaaggccaagaaattaaaatatgttgaatacatttaagctttatagcaaataccctgtacaagaacctaaattgaagctttcaaaaatctaaaaggacaaatctaaaaggataatccatttcatgatttttagatatgacatgacatagaactataattataagaaatatacccgagatgctttctgttcaaaaaattcaaagattcttcataactgggtaactaactaacataactgggcccttttctgttttcagactctctctggatgggccactgtttcctatggtgtcaattgcttcacatatggtgatgactaacaaatccttgtctccaacccaggcctcgttcctgagctctaagcccatatagttgtgatttgtgtccacgtgggatcatcattccccactcccattctgcccctccttttctatcttatctcattaaatgtccacaccacccacctggcagcaccttcctgatctctccctctcttcagctcttacatctttaccttaatcagtcttcaaagcctatggattcagcttttttactgtcactcaaacacacccactccctatccctacctctacctgagctcagacacttatcatttctcaggtgaagaatggcctctaggtgatcttctcttcccaagaattgctcccatccaatccattcttcatagccagaaggaccattctaaaaggcaaagtcagccatgcccttctgctgctgaaaatgtcctagttgaaatcaaagtcctttgtgatctacttcctgcctattgctgcaaacacatcttttgccttttattttttttctctgcactggacctagaggaatcctcaaatgtttactctgcctttcttcatgcctttgcacgtactattactctctctgcacagaatacctttcctcacactctccttttagccactttctgcatatcctcaaaactcatctttctccaggaagttttcatcagggtagtcattccttctgggtattcctatagcagatgtagtcctagtacttttacaatattccaactcattatcctctcttttcccactggactgggagatccttagatgctggatagtccttggtgtaagggcctgttttgccatctctcatttcccaggatcatacaataacacagggcctgcttattgtatgtcctccataaaattctgtgaattgaataagtcaaatgctctagaatgaggtcatgtgttcctatgcaacttctttctggaagccagggtaaatgaaggctacaaagaagtagctactgctgaaattagaaattttgttcaagtagacgcactgaatcagatttttaaggtgctagttaggccttattactggaatgtgtctcttatggagacaaagaggaaagtcttggtaattgccaacttcagctggtagtctctagcgaagaaggcagttacgtgggagagcctgaccctgtgcacctacagacagaaactcacaggcatgtgcctagggatataagcaggattacaaacctcaatctggtgtgtcaccaataaacaaaaagtaggtctttctttgattgtttcaagttttataaattcttaatgtgagaataaatagtaaacccctacagttcttatcaaacttatccttcaatttagtattttttacaaatgagctttacaaaaaagcttcatcctgacttgaaaatgccatgttaggggctacatgaataacttcagtatctttacttttgtatgtgccagtcttctgctgaaaagctgcctccctgggtcctatctgttttcttttctctccagatctctccagtccatgccatgctcacatgttttaatgctgtgtctctccactgcaaatattccatcctgctattaaaccaggcagccatttccattcaatgatggaaaaccctggaaacagtctatagtaagagaaggcttggcttttgacttcatggtccagtagaaatctgaacaacctacaacttggcagtggatgagggcataggcagcttattgattatgtaaccgaagggagaagaggatagaagttttacctgaaaatgccatgttgcctttgcaaacagtttctccaccctaacagggtttgaagctggccctggggtaggaaatatggtttgaatctggcctatggtttgaagctggccctggggtaggaactatgaatatgtgcaaaccagttgtttaatgacttgctaggtgactctcagctgctctttcaacttctgtctctaggataattgtgcttatcaggaaatgcaattctgttgcttatgttttctattttgaaagtgtggaactttatcaatgttttaagctttccaaaattgaatgtgaatagatatactttgattagaaactctaaatcctagttctaaaaagtctagttcatgaaaaataaaatgcggtttaaataacaggttgagtatattttgcctcaaagctgctgtttctctggccagccttctttcagcaggcatgtccaccgtctttttgtcactgatacaccaaagcttggaggtcacttctggtttctccctctccaggtcctcccatcagttatgcaatagccaagatgtatagattcagcttttactatgcctgtcctccccatctctttctctgaatttgcatgctactatctgagctctggttcacctgatatattgatcttgctcagattagcaaaataataccctgatgttctcactgccaacccacccaacatcactgctaattttcctgaaatgtgtctctcaaatcatgtcattccctgctcagaaattttcaagggagtaccgctacttactaaatccatcccgtatccccagatattcatcctaccctttttgctctatatgttttttgtttttttgagatggagtttcgctcttgttacccagactggagtgcaatggcacaatctcagctcactgcaacctctgcctcccagattcaagcgattctcctgcctcagcctcccgagtacctgggattacaggtgtgcaccaccacgcctggctaatttttgtattttcagtaaagacgggtttcaccatgttggccaggctggtctcaaactcctgacctcaggtgatccacccgcctcggcctcccgaagtgttgggatgacaggcatgaggcaccgcacccgcttatatgtcattgttttaaactatgggtgtgcatttgctgttctttcagcacattctttgtgcagcccttcctctgtgctattgcttatggtgctgctttatcccaagctacctgatttgaatccgggttccaaagaaaaggctttgtgccttttctttcttacttacaatatgagaatcataatatcacctaccttataggattttgtagcaattataggagggaatacaatataaaacaattacaggaggaatacaatataaagcccttagaagagctctagcatgtagtaaatattcagctaatgttagtaatcatgtttcatttctttcaaggaccatttcaaatccgtgtcgtaatggaagccttttatatcgcccaactcaatgtaatttcttcctctttttgtacttctttgaataatatttaacatgaaatgtcctgccttagaatttggtgtgcattcattttggctttcaccggattgtaaactgatgaacactgagtaaactttattcatcgtcatatactctgaaggatcttgtatagcacctggcatatcaaaagaacttagtaaatgctggctaagtggaaatcaattgatttttactaattttaaagtggttttccaccagttgaaagaaaaacacagtacataaagataagtaaaagaaacggacagctttataacatggatgtgactgcaggaagatactgagactgatgtcatttgaacgcacaacgtaccctgataacatcctttcttctgtgttctcccttgcaggtctgcttagtggcctatcttggcttgtttatgctttgtgtctcatatcaggttgacgaacggacatgtattcaattttctatgaaagtaagttgtgattgttctttctcttttatcatcacatagaaagaaatccaagtacaaaataaaggagtgccttcttaaggggttgcatatctgattagtctagaaattgcatttttaggcaggccaaaaaatgttttaagagggcattgatccagacctcaaaggtaatgctgattttttttttaagtcttaatttccatgaactgggttggcctggaggatatgaagtctgtccttcagtgcccttaaaaggaatattgaaaattcatcagttcaacaaaacacttggccagaaaaaaggtatctctttcagtgcccacttccatatctcgggggttatttgggatattttaataatgaagcagtctaagtgtatttcctcttgtaggtgggatcactgagacagaaaaagtacattgggcgcatccaaatgctctgtgccaagactctcagggcaaagtgggggacgggtgatgggatatgcgtggtttggcaagcgtgtgtgtctttcatttgtgtgtatcttttttctgttagggacagtgcatttggctggagccaattcaagtacacagcattttcactgcacaacagaatctactccaaagggaagcaaagacactacctttcagagtataaggacatagacatagaacttagcaatcagagctagtagaaagcaaattccttcattttctctcaactactatagcaaataatacaaagctatctttaatctttttttttttaatttggtccactaacattgttttttcttctacaagaaaacatataaaaactggatttttttgttcactacaatgagaaaacatcagacataaaagtaagtgaatgacattatttgaaagttactaaggtgaaaaaaataaggtgtgttggaagattccagtataattgaagctgttgacataaaaaagcaaagggatgatatcttttaaaatcatgctataaaaagtaattaatagatacaaacatttacattataataactaattttaaaaagctggttacacaaaatgtatgatattatcctacagaaaaaataaaagctcttaatgagcatagaaaatacaattatctatgagtggtgggattatatttgcattttgcagtttttctctaattttgaaatgttctccaatagttataacttttctaagtaaacagttaatagatactacttttttaaatgatgaagttagaattttggtggatatgccttcatttggaaattatacttttctgtctgaggactttccttgaaagaaggccagatagagtagacatcagtctatgtttactatttgtttggagaggtttgactaaacagcaaggcttggtgattaaaaaaaaaaaaaaaaaaaaagccagaaagcttagtaagaaatggcctgttaaattacaagaacttcatccagtagctgaagaacaccccaaactaggtttttattagtttatgtgaaataccctcattttccccccagatgatcccagaaaacagcagagtcaaaagcatcagcttaagagagaccccaatgccatctcagcatctgcaccttagttaaaatagggagtaagagaaaaaaaatagaaaaaaaaaaaagtcactgccaatgtcagccaggttgaggattccccactaggaagatctcattagctacctctttttttccacccgtgacaggcattggcaaatactgaggcactttcctcttctcctgaacgtgacctttcttgatgcttgctgctagctctctaaggttgcatgctacattatcttcaggttgaaagtgagcttcagcccatctccagattttccaatgacacaacaggggacagctgacttcccttatgcttctcacactactgggggggcgaaggcataacatgcatcttcatagggcgtttctcatcagcatagccgcattttggtgcccccatctcgggaccctggcctaagctttgttagaggatttatttcctcctgttgaatgcccagatagccaggacaagcaaacgggccatgatgacagtctcattgtagtccacacgtgcacacacacgcaccctccctttcgcttagagaaaatagccacgggctcttttttttttctcaagctgggacagccctctgggggttcggggattgggggtagggtcccttcgcaggccctcgatgccaccagcgcgttcctttttcctccctgggctttgcctctctgcctctgggcttggctgggcatcggctgcaggtcgcgcttcctgcctttcctagtggcctgactttctcagggctcccctggaggttcggaaacgtgtcgggggcatgtgcctgcggaaacattccagggcacgttccctcctgcccacatccaggaggcccctgggctgcttgcggcagcctcctcccgagcagtgcgctgcagaagggcccttcccgttcaggccaccggggaaggtaattaaattggagcagaaacaccctcctcccgaggtcaccgaacgtgaaagctgcaggccgggtaccaattaaaggcagcgagcgagcggagacgcgcccgggcgctgctgttacataagcgcccggggccaccgcgcctccgcccgctgcgcagcgccgggctgatgggctgacacccgcaagacagatgcctcccgcgccgggcttttatcaagatatatttgctcggattctcaaggtcatcgtaaacactcttccttatagtgtattcgtgccatgtaggtaaaacaagccacttgattttaaattacagattctaacccagaagcttgttgctgtcagatgagttaaaagccatgaaggaaaaatgccacagcgctgcagataaagcctgcaggctttaggggggatcgagtatatatttatgtcttaaaatggataagaaacttgattccgtggctttctctagtttacttggcctgatgctttccggagtgggagaagccgagtcactaaagtgtgagatagatacgcacgatataaatttattcatactcagagaagctaaggggcatggtttttctttatgttctctttgggttctagcataaacggtttaattaaaattgagcaaccactgtgtttgtgtaaatgtttacatccttcctacaagccaagaatgcattgttactcccacatgacaaaataagacaaaagcagtcgaattaatatcctcagtcctcagaactggcagctctttccatccctactaatttgcttattatttcacaaatacttaaataggctcctgtataccagacgctgttctaagttctttacagacatcaactcttttgatccttgtaattatcctgtgaagtaggtgctattatgatcatcatgccaagtttacagatgaagaagtacaggtgcacagggattgatgaatttgcccagggaccatggctagtgaggggagaacctgactccctggttcacgctgttaatcatcagccagtactgctgcgcacttgttaaatggtcttgggcacatcttttaatctctgagccaaaaagtcatcttttaaaaatagacaaaattcccattttcagcaaatggatttttgtgactatcatgaatgagtaaaatctttttcaactatttgaattatttgcagattgagaatgagggattattgtcattgcttcaagatattgcccaacaaatgttacagaaaattgctatctaaggagcttggtgcggtggctcatgcctgtaatctcagcactttgggaggctgagtcaggaggatcacttgaggtcaggagttcaagaccagcctgggcaaaatggtgaaaccctgtctctatcaaaaaaaatacaaaaattagctgggtgtggtggcacacacctgtagtcccagttactcaggaggctgaggcatgagaatcgcttcaacccaggaggcagaagttgcagtgagctgagatcaagccactgcactctgtctcaaaaaaaaaaaaaaagaaattgctatttaaggatgtatgtatgttagaggtaggaaggttatcacaagacccccgcccccaacttccatccattgttggtgataaaacaggtagagaaaactccatttggggccattctactaagcagatgactaccaggtgggaaatgatcactttaacctgggccttccctggttaaaatcatagatataccattgttcccagagcaaactgttcccagttctctgctggctgtactgggaatacagctacgatgggtacacacacacacacacacacagaacatggtcaagacagtttaatttggctcttggcaccaagagtttgaagtcagtaatcaagcctgaatatttcagaacaacccagaattgttcaaatattcttccccattggttctacaaaataaatccatatttttaggctaaaaactccaatttttgcataaaatgtagtcactgaaaatattgagggccagacgaagtggttcacggctctaatctcaatactttgggaggctgaggtgggaggatcacttgaggcttggagtttgagaccagcctgggccacatagcaagactccatctcttaaaaaaaattttttttatgatggtaccactttgtatatatctggttcccttcctccaaggaacactaatattgagtataatcattgttatgtccctgagatataagatgtttctataaactgtttcacagatgaagatacttaggttacatctgacaatcctttaaatgatttgaagaggaaaaagaatgtgtgtttaagatctctttgatgaaaagatctaaagaatccatgatactaattaagatgtattaagaaaaaaatggctttaactaattctacgctcttccagtgaccttagatagacagtcaagctgtatgtaatccctgatggattcccttacaggcaaaccagagataagcttagggcaccagcaaccagtatgtacacccacacccacacatacatgcacacataccactcaagaaaaagaaaaagtaaaaatgtaaatacagcattccaaatttaagacttgaaaacacttgaaatcatcactgtgtggaacacactcatttggaggacttttgtacacatattttgtagtgtcacatatatgttttaattttgaattatatataagggaaggtgggggaagggcatcatcttctcagagctactttcctctgaacctggaaatgactggaactaatattactttgtgaagtgtccatttaccagaattgttctctgtagagagcaacttttgactgtggtaatgtaattcttgcactaagaactatgtgtactagtctcaaaagctggggactctgagccttacctagagtctcagcaggtggaccattaagattaacatttctagtaggtgagttcaatcacaaaaatatttcttgttccatagattttattgtggccatgtcagtgaacacccacaagttttgctcagaatattttaggtgtaagctaaatccctaaattgttcagagttcccacagccctgtagcagcagagcgagaactttaaccagactttttcaatcccaaagctaatctggaggccaacagtgttcaaaaccttggtgactgaggaaccatttagagttttttcaggctcaggaatcacatggtcgttgttgggcttggggtaagtttcacaggcgatgaagctgacgttgagtcacttgacttctggagccataatttattttctcccagcaacctcctactggggattctcatgtttatggatacagtttggcaatcactacattgaatgtagtcttttaaaaaaattaacttatgctattagttgacccatcattgctaattttggcccacacagtgtttgcattacaaaaacctgttctttacttcctagtcttgtttcagtcttaatatcagaagttcttgagttcaaaataagcacaacatgtcatccagggatggctagcttgtttgggattcatctaaactgctggcaatatctagacaaaaacattccacagtccagctaatatggttgtcacaactcttgaaaagggcccaacatctggatggcaagtgaaaatgtgatcagggtttaagaactacccactaataaataaacatggagctatttccatgtcttgggtgttgtgtttctaagaagagacagcctttccatcagaaaatttctgggagggaagaaaaagaacagttttgatgaattcgctttgcaaatcatcatccaatgttctttgtaaccagaaaggttttcttctgctttcttgcagctgttatactttctgctgagtgccctgggcctgacggtctgtgtgctggccgtggcctttgccgcccaccactattcgcagctcacacagtttacctgtgagaccacactcgactcttgccagtgcaaactgccctcctcggagccgctcagcaggacctttgtttaccgggatgtgacggactgtaccagcgtcactggcactttcaaactgttcttactcatccagatgattcttaatttggtctgcggccttgtgtgcttgttggcctgctttgtgatgtggaaacataggtaccaggtcttctatgtgggtgtcaggatatgctccctcacggcttccgaaggcccccagcaaaagatctaacattcttgctcaaagttgcgagagaaagtagcacatggagtagctgaggttaaacaaacaaaaaaaaattttaaacaaagaaaggaaaaaaattgacaataaaagtcactcttctaattgaatatttttatatttttatgaaacaaaagagcatttcttcaggtttctattgtattttttttaacattcttgcagagaaagcaagatccaaattgattttgggatattaaaagttaacagaacactgaacaaggaaagaatggcatagatctatctttacagtctggagttaattcctgttaactcattttatccattccttacataatcttctttcctgttagtccagtttgatggtgtgaatggtgaatttcaggcccagttgctaaattttgtggcatcttcctctagtccttcccacctccagtcatcagccccactctgtcttggagacaggcaggaggtgggggaagagctgaatctctttattttccctggtagagacatcttcaaggcatgaaatagcttaaagagcagagtagaaacggaagaggctttgcaaaaggctagataactaacaacacctgggttggggcggcggcctcttctcttcagctcccttagcttggctccgtaagtggatcacttgccaaatgctttagatgattgcctctcaataattgaaaggtggtggtagttgtattctaaatgatgtagaaggtttaaaaataattacattatgcttctattctatcatctaaaacaaatcattaaaactaatttctagctaattgttaattataattatgctcagaagtctatttaatgagctctgactgtacttacgctgcactgtcggtgttaagagaaattactctcacaagagcagaggcctgaagattctttcttctgaaagccaagcaccacaaggaaaaaaaaaattattaatagctcaggttaaaaacacccatttaaacaaaaacaagagcatttgtaataggaagtgtttatacaaacagcacatttgtgatatgttgaaaagcatctctcttggcaaccaatctatgtttgaggaagattgggtaatgctgatgtgttccattcatgaaactgtatttgatacataatcctattattaattcgtatgcttagtcaacctaggaaatcaaaataatgttttgaagttcttatttgagcaatatggccttgacttggagggtagttttagttgttttgtttttaagtgactgtggtttaaagcacaaatgccccaaggtggggagacttctctctgtgattattgttgctattaaattctgaactgtatccatattttaaggaaggagctaaaaatggaaattcatgaaacataaatggtatcaagaactttatcagtatgctttgttgaaagcagaaattaagataataattgagttcaattcgcctctccgcattgcctattgatacactttactaatcatgaaattctaacctaaaaggaaaacattttcctgcttgtcttagaagaaagtggaataattccactgattgtgataatggtttcaatttctacacaatataaatatccagtataaaggaaagcgttaagtcggtaagctagaggattgtaaatatcttttatgtcctctagataaaacacccgattaacagatgttaaaccttttaatgttttgatttgctttaaaaatggccttcctacacattagctccagctaaaaagacacattggagagcttagaggataagtctctggagcagaatttatcacacacaaaagttacaccaacagaataccaagcagaatgatgaggacctgtaaaataccttgtgccctattaaaaaaaaaaaaaaaaaaaaagccagtaactgaatccattttgatttttggttgagtttcctacacaaagaagaaaataactgagaatctggaatgttgtagtccatcctttaaagagtaagaaagtagcagttaatgctagtaaccgtgaattaggcaccactgaaagcacatcccgaatttctttaacaacaacattttatagtgaacactacaagtttttatatttaaaaattaagactctgtatatccttaaggtgctctatgctttaccagtaattcacagggtatttcaaatggtagaatcattttagcttctgtgcttcctttttctaaataatgcaacttgtaagagttgacattgtaataagctttataatagtataaccgtcaggagatatatatatatatatatacacatacacacacacacacacatatatactatacatatataaaatggggatattactattgtatgattaaatcattcttaagtccccaaggaaaaaaaatcataaacaaatagaaagaactaaacagaaaagaaagaaagaaaagatccctttgctatgagctcgctgtatattgataagtgtaagaattgtgttgcatgaataaccgctttgggctggatttgaagtattttgatgttgtgttttgcaaatattgaagttacaataatggcaacagaaaaggaacagatacacagctttacacttagcagaatgttacatttaaaatctgacaaggcgccaagatggtgactgtctcctctaaaccacgaaagagtaagatttgtgcaaccctcctcctcttccacctccttcaggagaattaaatgaatcaagactttggaaagacggggaagagccgggacttggcagtacttgaaacaggaggaatacaccagcctaaatgtacagactttgtagccgagcccactcgatcggtctgtgccttcacgtgaccaccatctgtgcctccctcgctccatccaaatttgtgtaggctgctccttggagctatgcctaaaatatagctacaccagagccctggaaactgtagtcaagtaacaggcctcactgttttttttctttggattaaaagtgtatatctctctactgaggggtttccagctttacacttctataggttgttctgacagtgagaacacattatgtacatgttttctattcatgtccagggcatgagaatcttaatattcttatacttccctttttgcatgcagtatgtctggaatatgtttataaaattttagcaaggggtgagatcaagggacaaaggtagagtggttatttaaagacaatcagaaatgaacttaaaagctgccctgcaaaaccaatcctttcctatcatgaagagtaccttcatattttctagagattgtctctgaaccgttgctacatagccataaatttctgtaaatcatgttggctatcagttcttgctattctcagagcactctatcatgtttttaggtgtatattgtgtattcaggatagcattaaaaagaactgatggcaaatgtattgactcacagtggaaacattcatttggatgaagaattagtggtttagcctttgaaatgaataccttgaatcatttcttctgattttctagtagtttattatctcaaatgattattatccccttcaaaaatactggtctgtactttggtgttgtggattcatttttctggcattgatcaaatagcaaatacaaaataaagcatttctacatgtttgaggtggttgtttttaaaggggatatgtgtaatgcagattttctttattaataaaattttcataatctctgaaaacactgtttggacgtgctttaaagtaacttatgttacagatgaactggtacacataaaatctctcaagttagtgtttatttcaaaaatctgtttttggaaagacaaaaaccaatattcactgtgactcctttgttccagtgactgtctctgctttgctactctgtatccatcgtagaagtcaaggttgtaattgttcccaaggcaaagagagtctggctggaaaaagtcttgtaaaacgtacctggaatgctgattcttactttatatctaccaatagcaactaaagtttgtcctgaagaatgggattcacaagtcatattctctattttattataaagaaaaacagacagccttttccatttcagatcagaacccaagtctgaggcaatttaaacagttgattatactgtaaaatacagtggttctttttatgttcttagtaaagcccaggactcacaagcccagaacacactctctgatctaaattttcttttcttttctttttctttctttctttcttttttttttttttttttaattatactttaagttctgggatacatgtgcagaatgttcaggtttgttacataggtgtacacatgccatggtggtttgctgcaccgatcaacccgtcatctacattaggtgtttctcttaatgctatccctcccctagccccccactccccgacagtccccggtgtgtgatgttcccctctctgtgtccatgtgttctcattgttcaactcccatttattagtgagaacatgtggtgtttggttttctgttcctgtgttagtttgctgagaatgatggtttccagtttcatccatgtccctgcaaaggacatgaactcatcctttttaatggctgcatagtattccatggtgtctatgtgccacatttgctttatccagtctatcattgatgggcatttgggttggttccaagtctttgctattgtgagtagtgctgcaataaacatacatgtgcatgtgtctttatagtagaatgattcataactctttgggtatatacccagtaatgggattgctgggtgaaatgatatttctggttctagatccttggggaattgacacactgccttccacaatggtttaactaatttacacttccaccaacattgtaaaagcgttcctatttctccacatcctctccagcatctgttgtttcctgactttttaatgatcgccattctaactggtgtaagatggtatctcattgttgttttgatttgcatgatgagctttttttcatatgttttttggctgtataaattgacaaatgggatctaattaaactaaaaagcatctgcacagcaaaagaaactattattagagtgaacaggcaacctacagaatgggagaaaatttttgcaatctatccgtctgacaaagggctaatatccagaatctacaaggaacttaaacaaatttacaagaaaaaaacaaccccatcaaaaagtggatgaaggatatgaacagacacttctcaatgatctggactttctatcattcatgttaaggtggtagggcctcgagttgcaagtctggctgccacttactgctgtgtgactttgggcaaagcattccatctgcagtttcctcatgtgtaaagtggagaaaaatataactacctcacagcaacatggggaaggttcaatgaaacagcacttagcaaagcaactggcttctagatgctgcttaatacacatttggtttcttcctaccttagcccagttccacatagcctgggacttgtctcctcattactgcaggctcctgtccgcacatcaaagtagaaaaggagcgctgctttactgtgtgacttccttgttgtaaaccagaaacatgaaatgggcctcaaacagaaatcctgcttttaaaataagatagcaccaacttttgtagctagacatatagcacacaaaattatgtattggttggatccctttgttgttttacatatttggatgtgtcttgaatgtgactgtcttctctcaattcttctcccaggaagaagtagaactggagatatttctcctgtgtttcatataacttctaacttaatgtaatagaagcgtattttcccccaacttttagaaaccaatcttttgtacattatcagtccaccatatattaggttataatgtacaattcctcatttattttaaaagcaaccattaagcacctttggtatgcttgaccctgtgggtcactgattctcatttaagaatcatacaaggtttacttttgagcacaatcagaaaataccaaatggagcttcattctgcaaactggatatgaaaacatttacatgaaccttcaaatttgtggcagatttagttattgaaattaaacagccattaattgaccttttcccttgatagagcctatctatcttaatagttcatgatatgttattttatttttcacttagcacattcatatattttataagttaaactttgtaaagcataagactaatattagatattatatattttaaaattcatattgtaagtgaaaataaaactaatatatggggatgccagctcagagacaacaactcattatttccagcaaacatttatttatatatgtttattgatcccttccaaagcatgggtacttagaggaagtttttttgttgttgtttgagggtgtcattagacaggtcctttaatcaaagggatgggggagatatattcatgtctacatgaacatactataacataatattaaaacatactacaacagtaatactaaaacacagattttatctgagacatgaagtcttctgtttaacaagactctctgactgagggatgaggaagcctggagtcacttttgtgggacaagggctggtccttcctctcccacaggaaagcctgctggagaggaaggcagggcccagaatgggactgagacccacctggtgctgccaggaattgtggaggagacttagacaatacccaacgaggcaactgaacaaggagaggtcagtgggcgctttagagaccccaaacctagagactttggacagcacctctctctaggcagggtgccttgtttactctgtttgatttcctacccagacatttccccccagaaattctcactgtgttgtctttgcttggccaggtgtgattgtagagagcaggaggaggactctcaaggaccacaggggacagtggcactgtgaccagagaagatgagaataatcttgtgaaatccacccccaagtggtctctctacgttttcctagacatgtgtttgttagagcacggttacccagggagggcctgaaagtggtgcgccagccatagtgaattatcataagcagaggaagcagagtctgaaaattatgtgattaaagctgtcactaacctcagtggattagttttcattctttcactcaggtatttttacaaaatagataacgttccttcctcagatacttttgctcgcaagagtagacttaattttttattaatttttccctagattgcaacaaagtgacaaaaggatggttataagattgtaaaaggagagatcactgcttcattttaatatggggaagcttaggacttgggacattgagcatggctatttaaccagtggcagggaatgtgcactctggcaaatgcagggaggagtgacatcatgagtgtacttggtggctggacaaggtgcccacaagtgaaaacgtggattccatttggcctggcttgaattacaagtaaaagcattgctcctggtacaattcacgcccacccaccactagattttaatattgttccagacattccgggagaaactattagaaaggctctctccacctgattcatctctctgtcccctcctgggatccctctgctcctccagataagaaacttcctcccccaaccttattccacagcaaaatctgcccctccttcatttcctgtcccatttctatgggactctattaagatattattgactcaagtgctcatgctgaatacagagatttcttcataaatatggttttcattttaacaggctatttctaacaatcagaaaaactttcagatccagagaaatgcggcaccctgccaaggagtggagacccacccagtcatccttcaaactcaccatgtaggtggccacccactctgtctgaccagaattatcagactttcagggctcatgggacttggagaacatggaccatcagccccagccctggctgtggcttggaaacctgtgtggatctgtggctaaacaggttgctggttacaactctgtgctcagactggtggaagggaggtatccagaagaagctggcaggaagggatttttcctcccatgatttcagaggacattttactgtggaagacaggatgagtgaaagggaagaattcatgcagaacctctttgctcccagggcccggctccctaagcattccttgtgacaactcaccaaggttgactggctttgctcagacccctgagcttctctattcattccacacagaacaccctcagatactggctgggcttcacagtgctgcccagaggaggacatgtcagccaatcagcaggaaagatgctcatttcttgttgaaaaagtcccaaattgtaacttaacagggtgatctctctctcactctctctctctctttttttttttaatttccagaatgtgtttttcccctagagtccttgagcacagacctgcggttttctctctcctggttttacagtctatctgcctcaagccaagagacttggctctgctcccccctgactcagagtctcggctggtagctgaacccaggaagccctggccccacgtctctccctggaaccaccagaccacacagcctcctgtgctcaaccctttggctgggtgtcctgcctcctctttgtttggaaagagatgtcttacgtaactccacaaccttctaaaggctccattgtcttccacttgggagagctcaaaacaacccattagtgacttatgacttatcacaaagagaatctattgcccacatatccacagcccccatggagctagcctcacctatcttacttagatcaataatcaacaatgagacttaatgacttgtggtctttgggaaattataagttcagtacaaggtgcaggaaatacaaaggctagttcatctataggtcacggtacttcgcccaggcagcacatgaaagtcatttgtaattcaagattgagacaggcataaacaattctgatctgattattcttttactaatctgattttgataaacagctgatgaaaatggaaggtgtctggtcatcagaggagagatactcaggcagtgaaataagttttccttatctcactggatagggatttatttcaaggctcctattaatagcccctaatgccaagaactgtgatcgctgccctggactgcaagagccttctgagcaaaatgacagaaacccattgggtagggcattctccttcatttttattttctataagtctctgattagccctgttgggaattctagtaattattttaagctggcacctttaggaaaaaaaatatatctcttaggatttaattaaaaatgaaaagaacctctgcatgatgttgccaaggagctttcactgtttaaggtggggtgtagaccaggaagaataaaacactctgcactaggtgacatttccatctggttctgctgccagagcagccctggggagaggagcaggagaaagagaggggacagcctgctccagcctgctctctcctccccatggacctcatggtctttcaaggatcctgcaagtcctttgcttctttctttctgcagcagacattttctcatctgggaccagctatgtgacttgtttcaggtggaggcacatttctttccctgctcagtgacatgtgagtcctcgacaagctttcagaagggattcctgaacttggtgaggcacagccctctccaactgccttgtggagcatccctgggcagcatgcagaggagaggtgagaggctgcctacccgtgctgtggctgtccctcccacctcccttaaagcctccacgtcaggcgccagtccaccaggttcactgcgtgcatctttggacagcagttgcaaaactgagagttccagaaattgtgctacactcagttttgtgtatacatgtggctcaggtctcatcatcttcagctcatcacatttcaaaatgctgagagtagaaagcgtttctcattctggctttaaaagagagatttccccaaggatcacacctcttcagtctttgggcccaagcttcttgaaggagctacttgcctactttacagggcaaaattttagaacacataatttgaaaaccccaccaactttaatgtgaaaaaaaaaaaatcaattccttttgatttattatccccaggagacaaggtgaagttcaagtccacctcagataagaaaatgaaattgcttccgttttatgtgaatacaatctgcatccaaaatgggtggggctacctatactgcaaggacaagaactcaaaaggcagtgctcgaaatgctcatggaagtgtcattacaaatccattttctttttcaacactaactgactaggaataatttagaatagacattaggatgaaagtcctaactatgaatctgtaagaaatggaagaaattaccaagggatctttgtataagccctatttctgcagtatattaagtaaatcttctctgaagattattaataaaatagtataaaacactctttctagagtgtcttcattcaaatgctacccaaaaattataaggaaaaaagttttccaactggaaattatgggaatttaccaagccaatagagacttctaatagagtcattttcccttcttatttgtcccctggcctcttctggctctaaaaatacttctagtttaggaaattttagagacaagatcaaaaatggggaagttaaaggactgaagcaaggagtagaattgaaatatcaatacattatcacttcaagatcacaataacaataaaacttaaagcaaaaactccttaagaatcgtctacatagtttaagtacataaaaataacatgcaaaccatgctctttaactagacttgagaaatcccacggagtaatattttaaagagctcttgaattagtatttatatgtatcggagaggccacatattatggtcactaagagaatagttctggaacaagtttgcctgtgtttgaattccagtgaggcctcagacaagccaccaaatctgtttgtgcctccttgcctcagtttcctcatctgaaggataataaacaggggcttgtgaagaatgaatgataattattttatataatagatatagaacaatgctatgcaagtgtttgatgatggtggtgatgatgatggtgatggtgagaaactgtcaataaatagaaattcataggaatatcaggaaatcaggaaaataactgtagcacctaaaattcctatagcaaaacactttgcagaaacataagacaatagtttgtatccgctggagcctaagtacaaaacagcaatccctctgccctctgcaaacattagaaagtgcaacagagaagattttcttgtgtttgttcccaagccataatctgtactccatgggcaaactgggtcaggcttccaagtcctggcatctaggaatcctgaggctcactgacctgggagaatgatgctagggacagaataagacttttagagcccagagccatcccattggccactcccctacttccataactgcaggtaactttagattataagaaataccttatacaacctttcagggagtaaaaaagtaacaaaagcttagggtaatgagcagtgtactttggaaaggaaaatcccaccatctttgtttttgagactctggtaggttttatgaattaagtgtttgcacagatatatatgactactttcttcaatgcagctggccaagttattttcttcctgcccctccattaagctctgtccctgagccctgcccagcaccagtagtaactcaggttccatataagagctggactttggcaaagccctggtagggacttttgtgtgacagtaggaaggtgcagagcaaactggtttcctcaaattttatagattcatgtccagacagtcaaggtcagccctggaatccaagaaacaacaccttcaggggccttttccaaagctgttcttaccaggccacattgcctgccccaggctccatggggtggtgtcagaagtgggcttaaaatgcaaggctattctgttcaaacctaaatgtagagttctataaattgtcattttgggtacccttaagagctaagatagatgagatttagatttgtagcctcctggtgaattaaaaatagacatgaaatatagacaggaccaaacaatcttgctgggggagagatgccttcctgcctttgggagaaatgtcacaggatctgatcagaccatgaacaaacactccaagccacagtcattgctccaaaagtagtggatctatgaggtcaaaagaagggcatagccaacacgacgcttgaccccaagccacctcccctcctactccaagttcactctttctctgcttttctttcatgcagaggaagaagaaacaaaactagggtgagggaccaaggagacgtcagcatggaaacccttggatagctgcccacagagctttgcattcattcctcgtataacacaaaagagtttctggatgaaaaagagttgaaggtcagagtgaatgaacatgtgaggtacttaaagataggcactaaggttttcacgctgtgttctggcaaacttaggatttattgaaggtcatggactcttttgtaagaggaattaggcttcaggtggggtttttatgaaattactggattttagtgtacttttgagggatacttctcttcttccacccccagattataccctcatccacactctacctctgggcattgttgtcccagtgcagtcatggcccttgacattagcaaaggtgagaaatcttctgctctttagtttaggtcttgttacttagagtcaaatgttacctatttattataatatattaaaatcttctgcccttaattttaggtcttgttacttgtagtcaaaagttatctattatacttgttttcctgtaataaggaaaagtatgaaaagggaaaaggaaatatcattacaacctcttttagtttactcccaattcgatcacctttgcagttacttcttatcttaaaatcactatgttagggctggacagattccttccagtccagcttgtgtattttacagaaaagcaaactgaggccagatgaggttagatgactcgtttaggctcactcacctcaactctttttcttattaacataaactcttggcttaaaactggcatatgtttttctccccctccttttcccccctttactctttgtcttatgatttatcttctttttcctatttgattgggatctgcaaatgtataaaccctaatttcaacaggtttgaaacccctgcccagtattctcaaggatattaggcaataactcattattttttctttttttctgggacagggcaaaatgttgacatttattttgctaatatacccaggatttttcttctatatttattttttagaataaaagaagtaaataaaatggaagttactcatattctccgagaatgaagaaagggaaaaggtgatgtgggggacccaagacctatttgaagaagggtagctgtaagcgtgactagaaaacagtaaggggcagaccaaacagcctctttccttaagaatgagcccttggtgttgattatgtaacactggcgactgcaatccccgaggaagctgcccgcctgccacagtgtggttcagtggttaaaaacagacttgagaccagtcatattgcctcgtgtccaagcctaggttttgctaccatttactagctatatatatacgtggacaaattcctcaactactctatacccaagttcgttccctcatccataaaacgggggtaataagagcacccatctcatagggtcattgtgaggcatacatgggtttgtctctgtaatgcgctgggaagagtgcctggaacattctaagggcgcaatctgtgcttatcattatcattacctgttatcaaccctgtttcccagctcatctttgaatctgaaaatatgggctagagatggaagaggaggggaattattttattatacttgactaggtgctcaggaacactagagttacagcttgatgagagcgcgaggaatcctttttcctgtacctaaactcagctgtaaccatgaaggcatgcatgcttgcagttaacactgaaatagagagcagtttccagagtgtgctttcctagagaaatccctgataggcttcagacttttacattaaagtctagtttctggctaatataatgagtcctctctgaaactagcctagtatgcactgtgctttctcattgtgtcatcagatctacaacaggaagtggcgctcctgccaccaagtcttcagcagtggaattgggttttagactctgttgctaatgcccctattgccaataagcattcaatatttctgcttagccttcttcttgtgccattggtgatgcccttctcaaagatgggctggtcctccaggggagatacatgctgggacttctaaaaagccccaggatttcagagccagccccactatgatgcatgaaaagggatagtgggcaagtaatgggactttctgttttccatcagatcctcagtccttccggttccgtgtcagtgcttttgccttcagtgagtttgcagtggaagtctcaggagatatcacataattactagcacacaaggaagaagtggaaagtagagagggaatctaaagacaatttccaatggcaattaattggcttgacgccaaaaccttctgaaggccgttttatgctggaaagaaaaagagtgatctgggagtccctgatcctgctaatgaaatcatgcggcaggaaaaccttcccatgtttctgatttttttttctttgtctttcctacaaccaccagtgcaaacacacaacacccataatgaatggagaacctggttaattgtgtaaactccttccaaaacaatcaggtcttagccctccccactgcatttgagagagcgaccaaatatgcaacttaaagctaacacacattggacgtgggagtccgtaggtacaacagaaataagcaccatcatcggccatgccgccggaacagttagaaacattcttcacctgctcaacctgaaaaaaggacccggctccagcttatcttggtaagtggctaatgtgaagtgagctcggggaagccttccatggcctcagaaccatctcctgcactctgagcagtgcccttggcaacacaacagaagactggaggaagggggcgaggcccaccccaggagaaggaaaggacagcatgaaacatgatgcagctgctgaactttcttttcattacctttaaattatatcaatttctagactttgcgatatctactgaaaagagaaaagagacttaaaaataatctatctgcttttaacctaattcaaattgagcaataatgaaagtaattctgcctgtgcaaagactggaccaccactttcacagctccctgcctcccagttctgtgtggctaggagtttccatttcaactctcctgctctgaagcaagaaaaacacaggcctcactgctgtcgcctctggccctgtgttaccccttacctggagtgactcaccacatcagcccagggtgtgagcgagggcagggcttgtgtaccaaagctggaggaatgtgcaccatctctccagcttccttaatcacctgtgcctgaagggcctctgttagaaatgcccagtacctcctggatcattaaatcattgatgtgctccatagtccaagtggaattgggggaagaggtgaccaagatgttgcttggtcagctgaggttggagtggtagagtgggaacgtggtgggtagaggaggaggtgtttgcgtcaccaacccccaagcctttgtcaagatcctagcactccaagcccttccttgatcttctgccatgaggtatattttattatcactggatctatagatctttgagtcatctgagcttctcctcttggtcacaggataagaaatgagggcaagagggaaaggaaatgtaaaagctttaatatacctattttgtgctagtcattgttctaggagctggatatataggaccaataaaacagacaagctcactacatccagaaggagagacagacaatgaaaagacaaataaatagaacattttagatagtgggcaagtgctatgaagagggtgctcttacagaagagagaaaagaggtagggcaatattgggaaggatggtgagggaaggacatgccatttgatccttaacctgaataataaatgatagccagccaacaatatggggaaaaagcattataggtagaaggaacggcaaatgccaatcccaggaatgaggctgggcaatcagagcaacagaaagaagacatgggtcccttgatcagagtgtctgtggggccagctactaccgcacgggaatgaagtggtcagttgctgtcagattgcagaggggcttacaagccactgtaaggaagttgggagccattggagtgtttgcaagcagtagagtgacatgaagtttatcacctgtgtttcccactcacacatgtgacacacacatatatacccagacataaacacagggaagatatatgagtgggcagagacacagtttgagttgtcaaaatattttatgtttttataattgactgttactacaaattggatatttagaaagatgaacaatttctcagaagtataaaaggaagggctagattagaaaataagttaagtatttcttggaaaccgttttataaaattaatacctgaaatgaaacagcaccattcacacagaagtcatgctggacattgacttttgaaagccaacatttaagacatttcttcgtgaccagaacagggtcacaatagggaagaaaaagctggatggctttttcactaagccccttggacttacatatccattaagagaaggcacaacttggtttaaggaacaaaaaaccagtaatttacaagtggcgtggtttatccatatttactcagagcaccaagcctccctctgagacccagaggagaactttcagttttaccctcgtgcttaaccacagtggtctctctttgtccaaagacattgcaccaccctggaagacacagtcaatgaaagttcttggagcaagtaaacgttttggggtgttgacctatgaaattccttcaaatacttcttttattttgactgactgacttccttccttccttccttccttccttctttcctccctcccaccctccctctcttccttccttccatctttattttctttcaaaaactttaaacaggagaggcggacaaatctgaaagaaaagggaggattatttttattacaaactgtgagtatatccaatatggctaaaattacataatactgttcttctgaaaggatggagttttaaaaacctggtattctctgagactacaagtaaacagacttcatagccacagagcttcttgttgttgaaagcaaatatgtacagaaggcaaacaaatatcttttttaaaaaaccaaagttaatgttgaagaaaattatgatggtcttgaacagagtagttattagcaaagaatacatgaaaacatgaattacttgtaggtatattcagttcatcttatttgctctttaccaacttaaaagaaagatataatgaaacaaaatattttaagagtaaaaaacagaagtcaaatagtaaataaaatagggagatctacataaaataggagaatctactataaacaagacaaataaaatacttaactctgaaaaatacggacacttcccattatcatgtattttcctttcatagtgtttccagagctccaaataaattagattttaaaatttcattttcacctcagatatatttccttcatctgaacagacattggaagctagctcaatgattaaaaatgtaaaaaataatggtagactgaagtcctacaacaatatccgtgttccaatccttaggatcctgtaaatcagtgggccccaacctttttggcaccagggatcagttttgtggaagacagtttttccatggagggggtagaagggtcatggttttgggatgattctaacatactatatttattgtgcactttatttctattgttattacactataatagataatgaaataattataccactcagcataatgtagaatcagtgagagtgctgagcttgttttcctgcaactagatggtcccacctgggggtgatgggagagagtgacagatcatcaggcattagattctcaaaaggagcacacaacctagatccctcacatgcacagttcaccataaggttggcgctcctatgagaatctaatggtgccactgatctgacatgaggcagagctcaggcagtaatgtgagcaatgggtagcagctgtaaatacagacgaagctttgctagcttgactgccgctcacctccttctatgtggcctggttcctaacaggcctaggacctgtactggtttgtggtctgggggttaggggcacctgtaatgttaccttatgctgtaaatgttaccttatatggaaaaaagggactttgcagacatgattaagtgaaggatcttgaagtggggaggttatcctggactacccaggagggctctaagtgcaatcacatgtatcctcataagagagacacagagggagtttgacgcagaagaggagaaggcaatctgaccagagattggtgtgatgtggccaccaaccaaggaatgctggcagccaccaggagctggaaggggcaagaagtggatttacccctagaggctttggaagatctgcagccctgtcaactcacacctggttttcagggtggtgaaatgaatttcagatttgtggactatcaaactactacagataatttctgttgtttttggacatccagtttgtggtatttgttacagcaataggaaatgcatacaaaagctattctgaattaatgcttactgacacaggaagtgaaaagggtggcgagggggcagaatttttaaaaaatgagatagcatgaaaattatgtgcatttctacaccaaaggaacaaaccccagtacttgtttcattaggtttagggcatgtgtttttaaagaaaagcacataatagctaggtcatattggctggtaaggttttagtgctaatcatataggaagtgttgacttttcacttgttgaagggactacaagctctgaaaccttttttttctttttcctttttttttttttttttttttgaggcagggtctcgctctcttgccaggctgtagtgcagtagtgcaatcatggctcactgcagcctcaacctccttggctcaagctgtcttcccacctcagcctctcgagtagctgggactacaggtgcgtgtcatgatgccaggctaacttctgtatttttttgtagagatgaggtcttgccatgttgcccaggctggtcttgaactcatgaagtcaagcaatctgaccacctcagcctcccaaagtactagaattataggcatgagccactgcacccacctgaaatattttttaaataagtcaacataatacatgcagatgattaaaaaaaaatagtgcaggcagatttggactgagcactaattggctaattctacgctcccaaacttcccagccccactcttcattggaggtagtgcttctgatggttgttttcacaattccaaataacatgattatatctctattatcaactttaggttggggggaattccaatgacctctctattaagaaagatgaagattcagctctgaggttttctagctggatgcagattaaaatcacctgaagagcttttaaaacatatctataacttgtccccacccctataaattctgacttattttgtcttgggcgggttctaagttattagtcatttttcaagatattcagatgattctgctgtgaaatcaaggctgagaactaacttggctcgcattcaacccctgaattccttccttccttcctcctaacatttactagtattacatactttcttctttttttgtcattcttacaagtaggtgtttttatggtattaatctttattcaattaatctttattttagaaatataggctgggtgcggtggcttatgcctgtaatcccagcactttgggaggccgaggcaggcagatcacttgaggtcaggagattgagaccatcctggccaaaatggtgaaaccctgtctttactaaaaatacaaaaattagctgggcatggtggtgcgcacctgtagtcccagctactcgggaggctgaagcaggagaattgcttgaattcaggaggtggaggttgcagtgagctgagatcgcgccactgcactccagcctggcgacagagtgatactctgtctcaaaaaaaaaaaaagaatatcattaaatatctatttcttgtctgtaaaccttggatgccattttcctgattcctaactgtagtaggcagaattctaagatgatcccccaagtttctatcccttgatgtgcataccttgtgtaatccttttcctttaagtgtgggcagggtccgttactaatcaattaagtttgagttaatcaacgggaggtgtcctgggtgggcctgacctaatcaggcgagtcatttaaaagaaagtgaagcaacagagatgctttccagctggcctggaagaaagcaaacagccatgtcatgaactgcctctggaatattccatgaggaacaccaatcttacaacaacaaggagctgaaaatctaccacagtcagtgggctgggaagagggcccccacctacgattagagtgcagccctggctgactccttgattgcagcttggcaagacattgagcagaaaacccagctggttcatgccaagacgtctgacccacgaaaactaggagataatgagtgttgttttaggctgctaagtttgtggtaatttgttatgtagcaagagaaagctaaaatactagccaaacaagatgaagatatcgtgactcttactgttcccttaatatcacttctctgtttcctgaatcctagtttctatccactacacgtttatttttatattttcaaggataataatatttacattagccggatgcggtgtctcacacctataatcccagcacattgggaggccaaggcaggcggttcacttaaggtcaggagttcgaaaccagcctagccaacatggtgaagccctgtgtctactaaaaatacaaaaaagttagcagggcgtggtggtgggcaactgtaatcccagctactagggaggctgaggcaggagaatctcttgaacctgggaggtggaggttgcagtgagcagagatcataccactgcactccagcctgggcgacatagcaagactccgtctcaaaaaaaaaaaaatttacattctgttctaagatatgatagtgccatggttatgagaagggtctgtagcagactggctttgtttgaacctggttctactcactttagctgattaaatttggtcaagcaagatactctatctgtagctcagtttgttcatctgtattttacagatgaagaaaaataggtcctacttcatggtgttgttgtgagaaacaaatgagtccatgcatgtaaagtggttagaagagtgactagcccataatattaatagtaacttaagattatgtttatgcttttcatgattggactattagtttattctaaaacttaaaaagtaataaattgcgtttacttaaatgagactaagtaaatttctttatagcagtgccaaatggtgtgctcatatttagtatctttatctgcagatccattgtcatgacttctgagctgtttgaaagagaatgttctcagaatcaaggtaaaatggatactatttttttcttatacttcatcaatcctcaaaaatttgccatattttagcttatttcagatagaacaataacttttgtgtacagatttaaaattttatcttcctaacaaaaaattattttataatgcttaaaaatcatccagtcttttaagaattcaaaaaattccaggaatctcctctctctccggaaatatccctcagctccaatctggactagttctctaagctgtgaaatggcagccaacctgagatattctggtaaatacttgaacactttttttctagtgatcagaaaaaaaaaaaaaaagatagtggtataaagtacattttcctgaaaacttctgtcagtatgataatcacagattggaatagtctcatgaggaagtggaccagctttgaggtcaaacactcctgagttctaaccccacctcatcatttcctcaccaggagatcttaggcaaataatgaacttttcagagcctcagtgtcatctttagaatgatgataacagcacatggctgataattctgaagatggcaaattaaatgagatagtgaatgtaagccctgtgcatggtacctggtacatagtaaatgcttactaaatgggagctataatcattattagtcaatgactgaagctaatcaccctttcagcatttacttaacccattcaataagaattatttatttttaactggaatataaaacacaaaagaaaaagcatacaaaatgcaaacattctgtttaaccaataatagtaaaatgaacacatagatgacaaataaacaggtttaaaaaatccattgctatcatccctcactacctcccaaccctttacttcttccccatcagaaatacttccttgtaccttaagagtgacagttatttaattctgattttcttaaacttatatggtaaatacttccatgctatgtttttagttttattacctaaagataagccatagatgacttatgagttgcctaagaaagtttggtgtattgatttcatatttattgagggacatagtgtgcaaaaactgcacagaaactaataaagtgatatactgtttgctcttcagcagcttatagtgatgaaaaataaagccatgctctgtttccagcttgtctgattcccttttatgacattttcttatggagcataccaatatttactgaaagcaaaagtacgattagaaattgttctttttagaactgttttcaaagccaactttgtgctcacatcccatggcatgaagagagagggaaatggaaaggggcttaacatttatttagtacctgctacatgctcagcaatgtgctaaagtttttttccattttacttgtttgttaacaaccatctaatacggtggatatgataaaggagaaaaaaataggtttctctctacccttaataattcttaactggaactctccataacaaaatatacagattaacaagacaaaaacaaacagaagcttactaacatgtatatctcatatatacattggagaaatccagataaatgagtaaataaatctctagagtagatctcaaagaaagagactactcctgtgtctttagtttctctaaataaccagctcaaaataatcaattttccaaataggcatattttgggggctacagtcatattttggggtcatgtgtcctgaaccccaccaatatcattaaccctatttaacttgtgaggaaattgagataatgaatagaaagttgatacaatacaatcttaaaaatggtaatggtaattggtgagacctccatgtcactacatcagaaaagtataataattataaatgtaaatgcacctaacaatagagccccaacatgcatgaaaaaaatctaatagaattaaaatagaattagaaaactcaacaattatagttggagatttcaataccattctcaataattaatagaaatgttgaacaaaaaattatcagaaatatagaaaaccttatactatcaactaactcaacccaagtggcatatagaaacattctatccaacaactgcgaatacacattcttttcaagcacacatggttagaccataataggccatatgcttggccctaaaacaagtctcaataaacttaagagaattaagattatacaaagtatgctctccaatcacaacaaaattagaaatcaacaacaaaaagaaatctcagaaattcctaaatattggaaaattacataacatgcttctaaataactcatggttcaaagaagaaatcacaacgaaaattagaaaatattttagccaaaatatgccaaaattaaagcagtgcttagaggcaaatttatagttttaaatgcctgtatcaagaaagaagaaagctgcaaatcaataacctaagttttcacttaaagaaactaaaaaatgaaaggcagttgtgttttcttttagtaatcaagaaaactgacaaactatcagctagactgaacaagaaaaaaagagagaagacacaaattaacaggtgaggccaagatggctgactagaattagcgccgcttggaggttcccataaaaaaaaaaaaacatgataagcatgtgaatccttcaccagcaaccgaggtatccaggttctctcatcaaaattgactacaaggctggcatgacccatggagagaaggaggagcagtgtggtgccacttgagacccacatggggaagaggaacccccaaccctagtcaagggaggtggcaagagagctcatacccagctggggaaactgctttttccatggagctgcacaacccacagattggaagatcccacttgcaaacccacacctttggggcctagtgtcccaaccctggaatgcacagattcttacagcttctcagctggaatctgcttaagcctaccaaattcccaggggaaggggtgaccatcaccagatggggctgcctgctgtctaagccctttgagcttgggggaggagcaacaaccagcactgggactgggaactgcctaacatgctaagctccctgggcaggtgaagggcagcacccatttctatagctccaggctgcgcttttctcctgctggagccagggaggctggatggcttgttcccaggacttgtccctacagtccaacacatggactgtggcagtctgtggccagagtgcctcttcaggtctaaccttaacccatcctttctcagtgggtggggcttccctgcaagatctccaataactctagccagaggctcagggacagaattcagatctccctaggcctgaatccctagcgggaggggttgtagatcggtcagggtggtgggaaaattgtagaaagatgcaaaccttcttggaaggctggaaggttttgcaaaagcttcagaagagggtttggctgaaggcagctgaattatctcagagtagataacaaggaagtgtaagggacttgatctagataagttagtttacttaggcctcaggcctcagaactgactactctctgggggcaggggtgaccatgtgaattgcccacaagtgtgttgactcaaggcctttgtcattaaatctatactgaataaatgcccgcagcgccagctggttgagatgcggctgctgactgtttacagcaccctcatcagggtctgtgggtggccaggtcccctagcccactctttcactggatatctatgtctgagtgctctgttcatctgtcattcggccaaggtctgtgggttggacctggaaaggggtggccaaagtctttgtggaccagctgacttagcctctcctcctggtagttctgaggaatctgggcagcccaaatgagtgggctcccccccagcaaaacacaccctctccaccaagggacaaagagctttgttaaatgggtcctggtccccatgccacccaactggatgagaccctccaacaggggttttcagacaccctatataggagtgatcctactggcatcagattggggtccctcgaggtcagaggtcccagaagaaggagaaggcactcacctttgctgctctccagcctccttgagtaacatctccaggcatgggagtgaatcagatgaataaggcctgaagtgaacccccagtaaactgcagcagccctacagaagacggacctgactattgaaagaaaaacaaacaagcagaaggtgacaacagcagcagcaacaacaacaacaacaaaaaggcccccacaaaaatcccatccaagggtcagcagcctcaaagactgaaactagacaaactcacgaagctgagaaagaatcaacataaaaattctgaaaacccaaaaggccagactgcctcttctcctccaaatgattgcagtatctctccatcaagggtgcagaactggacggaggatcagatggatgaattgacagatgtaggcctcagaagatgagtaataaaaaactatgatgaactaaaggagcatgttctaacccaatacaaagaaggtaagaaccttgatgaaagtttagaggaattgctaacaagaataaccagtttagagagaaacataaatgatctgatggagctgaaaaacacagcatgagaacttcgtgaagcttacacaagtatcaacagccgaatccactaagtggaagaaaggatatcagagtttgaagacaaccttactgaaataagacatgcagacaagaatagagaaaaaagaattaaaaggaatggagaaagcctccaagaaacatgggactttataaaaagactgaacctacgattggttggagtaccagaggagatgggaggaatggaaacaagctggaaaacacacttcaggatattaccctggagaacttccccaacctagcaacacaggccaaaatgcaaattcaggaaatacagagaacaccattgagatactccacgagacacataataatgagattctccaaggtcaaaatgagggaaaaactaagggcagccagagggaaaggccaggccacctacaaagggaagcccaacaaacaaacagtggacctctcagcagaaaccctcaagccataagagattggggtatcaatattcaacattcttaaagaaaagaatttacaacccagaatttcatatccagccaaactaagcttcataagcaaaggagaaataaaatcctttccagacaagcaaatgctgaggattttgttaccaccaggcctgccttgcaagagctcctgaaagaagcactaaatatggaaaggaaaagctggtattagccactgcaaaaacacaaaatataaagaccaatgacactatgaagaagctgcatcaactagtgtgcaaaataaccaaacaacatcatgacgacacgatcaaattcacacataacaatatcaaccttaaatgtaaatgggctaaatgcccaaattaaagacacagactggcaaattggattaaagagtcaagacccatcagtgtgctgtattcagcagacccatcttacatgcaaagactcacacaggctcaaaataaagggagggaggaaaatttaacaagcaaatggaaagcaaaaaaagcaggggttgcaatcctagtctctgacaaaacagactttaaaccaacaaagatcaaaaaagacgaagaagggcattacgtaatggtaaagggatcaatgcaacaagaagagctaactattctgaatataaatgcatccaatacagcagcacccagattcataaaacaggttcttagagaccaacaaagagacagactcccacacaataatagtgggagactttaacaccccactgtcagtattagatcaatgagacaggaaattaacaaggatattcaggacttgaatgtcgctctggatcatgtggacctactagatgtctacagaactctctaccccaaatcaacagaatatacattcttctcagtgccacatgacacttattctaaaatagaccacataattggaagtaaaacactcctcagcaaatgcaaaagaactgaaataataacaatcagtctctcggaccacagtgcaatcaaattagaattcaggattaagacactcactcaaaaccacataatttcatggaaattgagcaacctgctcctgaatgactcctgggtaaataatgaaattaaggcagaaatcaagaagttctttgaaaccaatgaaaacaaagagacaagtaccagaatctctgggacacaggtaaagcagtgttaagagggaaatttatagcactaaatgcctacatcagaaagctagaaagatctcaaactgacaccctaacatcactattaaaagacctagaaaggcaagaacaaatgaatccaaaagctagcagaagagaagaaataagctaagatcagagaataattgaaggagatagaaacacgaaaaatcctccaaaaaatcaacgaatccaggagctgggttgtttgttaacaaacatgtttgtttgtttgtttgagacggagtctcattctgtcacccaggctggagtgtagtagcatgatcttggcttaccgcaacctcgcctcctgagttcaagcgattctcctgcctcagcctcccgagtagctgggactacaggcgcaagccaccatgcccagctaatttttttgtatttttagtagagacagggtttcactgtgttagccaggatggtctcaatctcctgatctcgtgatctgcccgccttggcctcccaaaatgctgggattacaggcatgagccaccgcgcctggctgttctttgtttttgttttttttttaattaacaaaatagaccattagctagactaataaagaggaagaaggagaagaatcaaacagaaacaataaaaaatgataaaggggatatcacactgaccccacagaaatacaaactaccatcagagaatactataaacacctctatgtaaataaattagaaaatctagaacaaatggataaactcctggacgcatacgccctaccaagactaaaccaggaagtagctgaatccctgaacagaataataacaatctctgaaattgaggcagtaattaatagcctaccaaccaaagaaagcccaggaccagatggattcacagctgaattctaccaggaatacaaagaggagctggtaacattccttctgaaactattccaaacaattgaaaaggaggggcttctccctaactcattttatgaagacagcatcatcctgataccaaaattgggaagagacacaacaaaaaaagaaaacttcagggcaatatccctgatgaacattgatgcaaaaatcctcaataaaatactggcaaactgaatccagcagcacatcaaaaaacttatccaccatgatcaagtcagcttcatccctgggattcaaggctggttcaacttaggcacatcaataaaagtaatccatcacataaatggaaccaatgacaaaaaccacatgattatctcaatagatgcacaaaaggcctttgataaacttcagcatcccttcctgttaaaaactctcaataaactaggtattgatggaacatatctcaaaataataagagctattgatgacaaacccacagccaatatcatattgagtgggcaaaagctgggggcattccctttgaaactggtataagacaaggatgccctctctcaccacacctattcaacatcatagtattggaagttctggccagggtaatcaggcaagagaaagaaataaagcatattcaaataggaatagaggaagtaaaactgtctgtttgcagacaacatgatcctatatctagaaaaccccattgtctcggcccaaaaactccttaagctgataagcaaatttagcaaagtctcaggatacaaaatcaatgtgcaaaaatcacaagcattcctatataccaacaatagagacgcacagagccaaatcataatgaactcccattcacaatcactacaaagacaataaaatacctaggaatacacctaacaagggatgtgaaggacctcttcaaggagaacaacaaactactgctcaaggaaataagagaggacacaaacaaatggaaaaacattccatcctcatggataggaaaaatcaaaattatgaaaattgccatactgcccaaagtaatttatagattcaatgctatacccatcaaactaccgttgacattcttcacagaattagaaaaaactactttaaatttcatatggaatcaaagaagaccctgtatagccaagacaattctaagcaaaaagaacaaagctggaggcatcatgctacctgacttcagactatactacaaggcgacagtaaccaaaatagcatgatactggtaccaaaacagacatatagaccaatggagtagaacagacacctcagaaataacagcacacatctacaaccatctaatcttcaacaaacctgacaaaaacaagcaatggggaaaggatctcctattcagtaaatggtgctgggaaaactggctagctatatgcagaaaatagaaactggaccctttccttacaccctatacattaactcaagatggattaaagagttatatgtaaaccccaaaaccataaaaaaccctagaagaaaacctaggcaataccattcaggacacagctataggcaaagacttcatgagaaaaatgtgaaaagcaattgcaaaaaaagccaaaattgacaaatcggatctaattaaactaaaaagcttctgcacagcaaaataaactatcattagagtgaacaggcaacctacagaatgggagaaaattttggcaatctacccatctgagaagggtctaatatccagaatttacaaggaacttaaatatatttacaagaaaaagacaaacaaccccatcaaaaagcaggcaaaagatatgaacagacacttcttaaaagaagacatttatgcagctaataagcatgaaaaaaagctcaacatcacggataatcacagaaatgtaaataaaaaccacaatgagataccaaatcacaccagtcagaatgatgattattaaaacgtcaggaaataataaatgctggtgaggctatggagaaataggaacgcttttacactgttggtgggaatgtaaattagttcaatcattgtggaagacagtatggagattccttaaggatctagaaccagaaataccacttgacccagcaatcccattactggggatatacccaaaggaatataaatcattctgctataaagacacatgcacacatatgtttattgcagcactatttacaacagcaaagacatggagccaacccaaatgcccatcaatgatagactggataaagaaaatatggtacagatataccatggcatactatgcagccataaaaaggaatgagatcatggcctttgcagggatatggatgaagctggaagccatcatccttagcaaactaacacaggaacagaaaaccaaacactgcatgctctcactcataagtgggagttgaacatagaacacatgggcacagagaggggaacaacacacaccagggcctattggggggtggggggtaaggtgtgaggggaaggaacttagaggatgggtcaataggtgcagtaaaccaccaaggctcacatatacctatgtaacaaacctgcacattctgcccatgtatccttttttttttagaataaataaagaaaaaaatttaaaaagacacaaattaccaaaataaaaaatcaaaggattgtaagggatattattaataactttattccaataacttaggaaacttatatgaaaagaacacatttccaaaaagtcgcaattaacacatttgacccaggaagaaatagaaaatttgagtaggcatataataaataaataaagtaaattagttattaaaaatcctcccacaaagacaaacccaggcccagatagctttactggtgaattctatctaatatttaaagacgtattgtcagtccttaacaaatttgtttaggaagtaaaggagggaacacttcctaattcattctatgagaccagtatttccctagtaccaaagccaaacaaagacctcacaagaaaaggaaactatagacaaatagccttcatgaacacagacataataattactaccacaatattatcaaattaaatccagcaacatataaaatgaattatacaccaagacaaagtatcccagagttatcaaaagtttatcccaggaatgcaaagttgctttctgatctgaaaatcaacctaaaacaggaaggacaaataccacaatgcccatctcgatagatacataaaaagcatttgacaaaatctaatatccatttatgattaaaaactctcaacaaattaagaataaacaagaaaaaacaaacaattccatgaaaaacaaaacaaccccattaaaaagtgggaaaaggacatgaacaggcacttctcaaaagaagacattcatgcagccaacaaacatatgaaaaaagctcaacatcactgatcatttgattgcaaatcaaaaccagtgagataccatctcacaccagtcagaatggcgattattaaaaagtcaagaaacaacagatgctggcaaggttgcagagaaataggaatgcttttacactgtttgtgggaatgtaaattagttcagccattgtggaagatggcatggtgattcctcaaggaactaaaaccagaaataccatttgacccagcaatcccattactggggatatacccaaaggaatataaatcattctattacaaagatatatgggcacatatgttcattgcagcactattcacaatagcaaagacatggaatcaacccaaatgcccatcaatgacagactggataaagaaaatgtggtacatatacaccatgacatagtatgcagccataaaaaggaatgagatcatgtcctttgcagggacatgggtggagctggaaaccattgtccttagcaaactaacgcaggaacagaaaacaagacaccctatgttctcacttataagtgggagctgaacaatgagaacacatgggaaggggaacaacacacactgggtcctgttggcgggtgggttgcagggaaggagagcattaggaaaaatagctaatgcatgctgggcttaatacctaggtgatgggttgataggtgcagcaaatcaccatggcacatgtttagctaagtaaaaaatctgcacatcctgcacatgtgccctagaacttaaaagaaaaattaaaagaaaaaacaaaagagtagaagggaacttcttcaacttgtggatttggtggcttttgtacaattctctaaatttactacaataatttaagtttagatttacaatgggtacattttattatatgtaaattacacatctgtatagctattcaaaaaattaaacatggctaaatttcctcattcttatcagtaggagctgttatgagcaagaagtagatctttattatgttctctttggagcacagctcattaggattgctcaatcattttttagtcaattactcaactgagctttaaaaaactaatcatgttccatggactatgacattcaagtagctacatgtccttgccatactaattatcttttaactactcttttttttttttttcctaaaagcagctttttgtacctgctttctcatctctgtgcctttgcatacactgtacccttcagccactacatggtgcttttggcctgtgtagcctggttgctgtccagaatgacttcagggtagtttaagagagggagacacaagatgtgaacaatgttagatgggtaagtcaaaagctggcaacggtctttatcagaaacaattagacaactttaactcacactcataggatagatcttttctctctctctctctctttctcggcaaaaattgagtatgaagtatcttatggctcagaatttttctgaaatgtgtgttccttgggctgtgtgcacacaaaagccaaccttatgagggagcaagtgggtaggtacacaggcaatggggcttcatgtattaattcttcaaccaatatttattcagtgtctgctctgtcccaagtgctgatctgggtattggagacccagcactgtacaaaaccaagtctctgccctcatggggcatacattgtattgggagagaaacaaacaataagcaaagagacactgatatttaagctgtgagagttttggaaagccttgaaaagagaaaaggagaatgtgggaatgtggaagtggcagttacaattggataggagtggccagccaaggccttcctaacaagatgacatttgaatgtgtctgaaggaaatgagggagggaactgtgcagctaacttggaaaaaagcaacccaggcagagagaacaggaaatacaaaggattgtaggcaggaggattctcggcatattcaagcatgaaaaaggaggaaatgcatgtagctgtagcacagaatataaggggtacatggtagagataagttcaaagaagcagaggtgatgtggcttgtagatcatgaaggaccttgcagggcattttaaggcctttggattttagtctgagtgaagaaggagctattgaaggactttgagcaaagaagtgacataatctgactttttaaataaagggattactctggctactgtgttgaggttggctatagtagggtagaggtagaagtggggagaccagttaagatgctattgcagtaatccaggtgagaggtggttgtggcttagatcagggtgttagcagtgagaagtgaccatgttttgtatatgtttttaaggaagagccaacaagagtagctgatgattagatacagggtgtgagaaagaaagagaagggtcaaaaattagtacttactttagtcatttaacaaaagtttatctaatactaattatatgccaggcactgttccaggttcttgacaaatattgactcaatctttgcaatagccctatgcaataggtactatttctttatcctcattttcctgccttcaaggttttggctctgagaagctaggaggatggagttgtcatttacttagagaagacagtataaagaagaggttcaaggtgatatgttaaggctgatgttaatgttgagatggctgaaacaacttcatggagatgtcaagtgggcagttggttaaagaagtctggagttaaggagtgtggtcttggctggagacatacattcagtggtcatctatgtaaagatggtatttgaagatgaaactgatgagatctccaagcgagaacagatacagaagaggagaggaccaatgaccaagcttgaggccatgcaatatttaaatatggagacaaactatcagcaaagacagagaaatggccaaagagcttgacatcctgaaagccaagtaaagaaactgtttgaaggaggaggaagtgggcaactgtgttaaatgccataattggtcacataagaaagaattgggaatttatatattggttacttcaagaaacaggaggaggagaatagaagatgggagtgaagataactcttttgaggcattttctgtaaaaagaagtagagaaatatggcagcagccagagaataatataggagcaggagggttgttctttttttattttgttttaaggatgagtaaaatggcacatttgcatgctggtggaaatggtccagtagaaaaggaaaaaaaatattgatacaggagagagaaaattaaaggatgtgaatgagaaactgagagaggatgatcaagtagagggcttagacttggatagaagcagagacaagtcatcctcagttcgtggagagaaagtaggatgtatggagacagatgcctctttggagggagatgtggctgacactgggactccctccagattgtttctatttttcagtggactagaaaaaaggtcataagttgagaatgaagatcagaggaagcattggaattttgagaagagaggtgtgaaatgaatatccagaaaaatgatgactgtcagccaaagcatttgcccaaccacaggtcactccatccttccagtctcagtacttgggtctggaaaagtttggttttcaaggggtccctattagaatgcaaatatttgggaacccaggtgttcttcagctgattttcttgattaacacatttgtgtcagaggatgtctgagctgtgaggcagtgtgagtcagatccctcaggtcctgatggttttacttgattgttcctaggaaatctaaatttcaccttctcttatctatttcaaggaaagtaatttattaaatgtaaactgaatgtaattcatttgaaaagatttgcaagatttaatatagtgaaatccacatatcagaaaaataatttatcaagccatttttcccaattttttcctgtagaaatcagacgtaagaccaagcctttggtgagcatcaagtaagtggtggtaggagagacatctattcttacaaaggaggaaaggggtctcctactgaaggagaggcattgtttcagactaatagttactttacaattatggagattttctctgtgtctgtcaaagctaagcatcattgaattaataccccatcccaaattaacaaatactgagcaggaacatactaacttgtcctgtcttctactattagggccaaagaatttctacagaattttctttttttcttttttaaattaaattaaattaattaatttatttatttatttatttatttatttatttatttattgagatggagtcttgttctatctcccaggctggagtgcggtggcactgtttcggctcactgcaccctccacctcctggattcaagcaattctcctgcctcagcctcccgagtagctgggattacaggtgtccgccaccacgcctggctaatttttgtattttcagtagagacagggtttcaccatgttgaccaggctggtctcgaactcctgacctcaaagtgatccacccgccttggcctcccaaagtgctgggattacaggcatgagccatcgtgcccagcccagaattttcttttttaaaaagtgtgttttcttacctctaggatagcaaaaaaatgcttgacataaggcacatgggctctggcatatcgctgaagcttgctttagaatccaagttctcttgcattctaactttgtgatactgggaaaatgtcctaatctcactgagacactttcctcttctctaaatcacaggctactgatgaaggttgttatgaaattcaatgaaacaacatgtcatagtaagtgtgcaggcctgtgtctggcatattgaaagggctatcattatgaattgcgtgttgctagacacttaggtgttatcttcccttatacctggagaagcatctagagctccctctgaagatttctgcttaaacttgtattgggaaatccagctttatacacacacacacattttatatatacatatatatatatatacacacacacacacacacacacagtttttcactatactgtcactcaaaacactcagtacttcatttctgaccattaaaatgtatgggcttttttttcccacatcaagcaattctctaattctctgcagataccaactgggtgtcctatagttcaatacaatcctgataccaatccaagttagcacagacaccacaggttaagggttcagtcccaccagactgccccccacttcagatgccagtcataagaagtaggtccctatgttacccacaacttctgttccacttggctacaaatcagaagttctcatgatcctcctcttgggttcaataatttgctacagctgcttgctcacagacccaagaaaacagtttacttactagattactggttgattacaaaggctatattaaaggatacaactgaacagccagatacatagagcaaggtatgggagatgtggcatggagctacatgccctctctgggtggacagccctcccagcacctccaagtgttcagcaaccaggaagctctgtgaaccccaaccctttgagtttttctggaggcctcattacataagcatgattgatcgttgatcattaatgattaactcaatctcccaccccttttccctccccagaggttgagaggtggggctgaaagttgcaatcctctaatcacaaggttggtttccctggcaaccagcctcccatccttcagggctttccaaaagtcatctcattattaaactcaggtgtgtttgaaaggagcttgttatgaataacaaaatatctttattgctattatcaagattcctggccagaaaccagatatgaagatcaaaatatatatttcctattacatcataatattacaatacacaacccaaagacccacataccactaaaacagggaaataaaagaagagttggaaagtggggaatgtacaggctatgtttttaattatctccttggtaatataaacacgtcagagactgctgtatattttgctcatctctagctggcctaagactctgggaatccttagccagtagatgaggaggacatctttgttttaccataatattgtaaaagttccagaagggtggggaccatgtgtctaactgaactcagtaaagctgcttaataactcattaaatgaaaggataataataaaaaaaaatgtgtgcctgtcctcagcagttgggtttcaaaggactgcagccacaaggtccatctcacatggcttggccccgggaagtgagtgggtgtgctggcggctgcacttgaagctggttttaatgataccctccaacaactgcatcctttgctgatacagctgtttcaatcttgcagctgttgtgctcttgcttatatgtcactgtttaaaatgaggatagcaggaaaaactcttggggccacatatagaacccccatgggcagagtcctcaaactgggatgttccggaagcaagagagccaaggctctgtgttatgcagaaagcctgggcttctgtgacctctgtgtatcaatcagcccagattctagacactctgtcctggatagggccccaggataggcccactgggcaaagcacgagccgataactcaaactgttatccgtgaacctgaccaggcgggagggagtcagtgtgtgtagtttataggccacagccatgaggccatatgtcttttacagccagctggagtgtcaggctgatcccatgcttgtcacctggcccttttcttccctggcaagtgactgctgattcctcttgtaggccctccagaatctgggactatcagtgcaggttgcaggttatgctgtgcaagggtttttagtttctttatttagccatggaatctcatctcccaacaaactctcaggccaaagccggatatataaaaacagttagttctggaagtatttggcatgaagtggtagtagatgaaccaaagctggctatctctgccacaccaaaattcactacacacacacacacacacacacacacactcacagacactcattgagttacctctatagaattcttaggactctaagcagaggcagttagaaaacccctgatagtgccatttttttcatttttatagatgagaaagcaactctaggtctttcctgcctaatgtagaagctactagtcccaggtagccactgagcatttgaatggctagtctgaaccggggtgtgctgtggttgtaaaacacatgcaggatttcaaagacttggtaccaaaaaaaaaagaatgtaaaaaatctcattaatacattttttattgagggcatgctgaagtaataatagtttggatagatcaggtccaataaaaaatactattaaaagtaatcccatttgttttgttttactttttaaaatatgactataagaaaattcagaattacgcagtggcgtacattcatgactttctaaattataattgtattgaacagcaatggtttctattgttttgctaaatgccttttcaaggctatctggatcattggagacaggtcagaactcctaactaagtgctctctcctttccaccatccccacatgattcatttacatggagaggtaattgacagatagaagcttacattaacatccttggggagtttcctttaatttaatgggataagaggaaagaacttgcagacaaaggtaaaggtggggtaggattaggcccatggatgatcttcctaatgacttttgttatctagagcattgacttagaagcaccaacttagaaacaagaagggctgagtctagagcctttgacaattactctctctccttgcgtaagtcactagacttcctgggtctcatttttcttatctgtaaagtgaggagataagttcacagcacccaaagtcgtcttcagctctggaattccatgactcaccatttttgtcttcacccatattcttcagtgctagcaaatactttttgatatagtgttcctgcatttatttcttttaacttcttgatcaccctcttctcctaaaacccaacttcagctaagataagtaggattgggaagggaagattatttcgaagacaactgcaagtcactcctctttactcttgaccccaacagcagtgaaagatgagctgtgtgctcttacctctagctcagtaaaggaggaccaggaggaggaagacggcaaggagggaatgaagggggaggaagcagagagatggggaaagaagaggaaaaagatgaagaaataagaagaaaatgggttttagcaatgcatacctgaagggatgatgagcctggactctctggactcctagattatgaactcctgcagtggaccatgtcctattttttggaggcgttggggggaattgtcttacgcagcacccaagcacactgctatgcaatggaccacagataggaagcaagcactgcatttggctcactgagtttgtagcccctgccttttatagccagcaagttgataataattgtgagagtgaaggcagatgaaacacacagtactcagagtgagatgtcaaacaacaaatttactgagctttttaccttccttctgagcccctatgaagcagaaaacacccagacattgttttaagttagggagtttccagctttgcaagtgaactccctggcggagggccaggcctgccgtcagctcgtgggagcgagcagcattctcggggttgtgttggaagttccaagcgtatgatgcatttatggcaggatggagctggtacctataggtttagggtttaatttttgttctagaacgtacttcctctctgaattgccgcatgtgctgagacgctggttgtgctgtttccttctgaagccctctctgttttaagtgttgcctcgaaaggaatgatgaggcgagaagcttgtctcaggccccaaccacacctggcagccctgaggggagagcagtgtgaggggacatggctctgtggcccacagtaacccattgtcttcccttcacgtgggcttcgcagagggcagaagggactggcactgctttgaaaggcagtgtgaactcaacctctcccgcccacaccagggacaccaacctttggggttagcttagccagcaaccaaagaacatttaattaaaacatactttttagaaaggaagaaaagaggccaacacaaaatagctatttaaaatgccagatttctggaaaatcagaagagagtaaagctggagcaaattctccggtggtggtggtcagggggttgcagtcaggactccttcagggccattatcctgctgcttctggtgtccagtacctgcctctcagaagacagaacacaaaaccaagctctaccaaagccaataaccaagtatcaaatactgtgaatcagggttccttttggaagtgtccactgaggccctctcagccagaacacaaaattcatttcccttaatatcctgcaggcatatggataaactgctcctttggcagtttcttaactgaatgggggctgatggagcccagccaggctccaggtaaatgagactgtaaagtggggctcaaagaaaatgtcctctgggttgcgcatgctctgttgacacagggctggttaaaatgtcctggagtgggaggtccaggtccaggtcacttccttactagtgcctcagggagactctcccttctcaccagggcttatggtcctttgtatttttctcacagaactgaggatcccagccctcccatctccatccatgctcagggattgtagtgggggaagaaggacctccctttctgcgtgtcccctcacttgtcttctgagagctacctgtaaaagagacaggctttgagctacaaacaaaagccaagcactccaaatctagggaattgcagggtcaccttgtacattactcaacttggactgccgtaacaaagtattaatacaatagactgggtggcttaaacagcagaaatttattttctcatggttctagatgttagaagtccaagatcaaggtgctggcagagttggtttcttttgaagcctctctcctctgcttgcagatggttgtctcttccctttatcttcgcagggtcttccttctatggtatcttctctctttataaggacaccaatcgccttggattagggaccaccttatgacctcattttaactcaattaccccttcaaaggctccgtcttcaaatacattttgtagtactgtaactcaaatgtgtagtgctgtaactcaaatctcttcaaatatattttgtagtactgtactcaacatgtgagttttgggaagacacaattcagcccatacaccatgtctgtgactttcaagaaggctgggaaccatagcaacacaccacatttaaatcatccaataatgccattccatttcctcttcttccccaaatgccccagttttattggcctttctgagctccttaggccagttttctccaggatttcagttctctgtggtgctgaggacattccctggaacatttcccttggggacagcagcattgccaaggtggaggccaatgtgctccctcacccgcgactcctcccttgctggccgttcccagctcagccaaagcagaaagtgaggcccagttagagggttgtggtcttgcccgaggagccagggctagcagacctcccagtcccccaggggcaacgttcaaaaagatagccttctcctcatcagcttgtacgtcctgttgtgtttacaagcaggccttctctgcatgaaacaggttccagataaggatgttcagaatttgtttggcttcccaccactcctgaaaagtaattgcctggtagtgcaggctgggaaagaagacaggattactgagcccagagatgatctcttttaacccctctgtttttttttttcagatcaatttaaagttacttttcctacccctgaaccagatcaacaaccatcccctttactctgggctttgcaattcaactctattttctatgattgcagtgctgagcttattaaacaaaagcagctcttgtgaatcctctccctaagatgatcgttcctgggtggtccttcttgggtgggtccctgggcacagaaaccccaggccacgtttcctcctctgctcagcacgctgggcagattctgcctcccgcagctcagctctggctcatcaggagataagatcagagacactacggaagggccaggttttaacaaggcagaaaatacaagctattccaaacatgaggcctactgtgcaaaaaacaaaccccctggctttgggggccctctcctggagagggtttctctgctcataaagattggtatcaaggggtgaggagggagtcatgccatcccagcaggacctccagttgagggcttcactttcaattacccaagagcagctgtagactgctgcttatgtaatgggctctgcgcctccttctcgggaggaggatgtggaaccgttttgtgtttgctgaataatgagtcatggtcagagttagggagcagaaacagtgactctctcccctgcattgcttcatccggaacttctagtaaagaatgataagccctgagtcagtgcccagtggggcctgccctggaaggggaagcaccacaggaggctctgaaatgcaggccccacagagcccacgcaccaggctgaaggagactctgggggcatttgaagcccagatgggctgcttgcaagaagattcactgtttatttaggcctgtagctgagctgccagggttttcctatctcgggtaatcacagctcctccagccaggatccaggagtgttggggtgaagactgaggcttcaaaatgaacagagctttctccaaacctcattttagctctaagaaatgaaacaagtcagccgtacacggtggccctgctgtaatcccagcattttgggaggctgaggcgggcggatcacgaggtcaggagtttgagaccagactggccaacatggtgaaacaccatctctactaaagatacaaaaaaattagccaggcatggtggcgagcgcctataatcccagctactccgtaggctgaggcaggagaatcacttgaacccaggaggcggaggttgcagtgagtcaagattgcgccattgcactccagcctgggtgacagggtgagactccatcttaaaaaaaaaaaaaaagaaagaacaagtctgaggggcgggagaaagggcacgtttatatcaactgagaagtcaaaaggtttggttttagccagaaagggaaaaaaaagacacattattgctcacattctgaggtcaaacaaacaaacaaaacccctgagaaaacaatatgaagccctgtaagaaaaggcttaatggaccagaaattatttgttcctcttcatgtttctgagaaatgtggttcaaactttatagactttccacatcagcaaacaattaatcatggcttgcactcccaccccaccatgcttttcaacatacctagcaagaagccacaggccatttcttgtctttctgtagcaaatcacagaccagatctgggtgcataagcgaggtttcctatggagttggtgggttattctatggtgggtgctgcaggaagttcagggcagcttgcctaatgcacaaggaagggaacatttccttccctgtgcaaggcttcaggagactgacccctgcctatgacagcataacacaaagctcaaggtcaaactgcctgggtttgaatcccagctctgctacgggccaccagctatgtgagtctggcacacaactgatttctctgcttggatccctcatctgtaaaatgaaggcaacaaaagctgctacctcgtagggtggttgtgaagactaaagtaaaacttgtaaagcattttgagtgtttttctttttctccatcattatcttttaaggttagcctaatgttcatctctagtgacttctatctaaaaatttgttagtgagacagaatagcataaacaggtcttatggccaagcagatatggcctttttacaactagtaaaatttttctttagaattttcatttgcaaaatggagaaaatataaatttatagtaaggattcgataaagtatataaagtcgtttagcttagaaagtgctcaataagcggtactttggttataattctcaatagacctgaatctctgctcaaataagttccgtatttcattatcccatgtagcaagatgaaatcccaacacccagatcacagacatccctttagagtatttctacacatatttataatataaaatttcagagaggaaggacattcataaaattctaatttaaaacaaaatccttaaggcatctaattcttaaggcaaaacattttgttgtttggttgagaaaaggaaggaggaaagatgaggcaattctttagattctttaaagaagggctctttcagcttgagttatattgattgacttcctggcttgaatcacttcatggtattttgttcaactcagctgaccataggaagcagatgacatacctcctctgagactggctctttagcaccagatggacaagataagtgctataagatgaggggcagccacatggctgacatcgtcatcgtcatcatcatcatcatcatcatcatatcatcccatgtagtgtccacatgtagggaggagcacttcttgtgtgttgagcacagcactaaaggactttacatattaactcagttttatccttacaacaaccttgttggcttaatattattatctctatcttttttatttttatttatttatttatctatttagagacagggtctcattctgtcacccaggctggagtgcactggcatgatcatagctcactgtagccttgaactccttggctcaagcaatccacctgcctcattctcctgagctaggacaataggcatgtgccaccacatctggctcttttttgttgttgagaagggcagtggggggttcttgctatgttgcccaggcttgtctcaaactcctggccttaagttatcctcctgcatcggcctcccaaagtgctgggattacaggtgtgagccaccgcacccaggctgtttccatcctaagaatgagaaaatcatgttctttagagtctttcaatctgttcatggttctgccgctaagtggtacagcaggggtgagaatccaggatcccaatcatggaagctttttccattaggctttatggccactgctgctgagggtggggccttcccggaagccactctcacccatgccattgtggtttataaatcatgctaaatgtccctgctaagcagcccaagctgacctgctgggctagtggccctgtcccgggagcgctcacaggcagtgttgggagagactgcaaccattgctgacaggccggaagaggcattgccatcctcagactcttggtgcaactgagatgaacttgacagaaatgatttggttccacaggaaaatataattccccctaagttattttgtggagtcagcggtaagggaggcaggggcgtccccagtgtcttggtgcagatattggtgccccctgagagggcagacctgatggcccggacaagtttcctttcttgaaacaacgttaatttgtccagttttgtggcttttttatgtggaacaacattagctcatccaagcttgtggtttatttgaaaacgaaattccggtaaatctttcgcaccatctggcagtgtggtgattggccgcgagttaggaacaagccactgagcacacaagaaaacaaagcagtgaaaacccaccaccccaaacagaaaggctttctgtaaattttgtgcctcagcaaccccacggggctctctgaggacgggtctccctgtgagcagagctgtaacctgtcactcttgggtgggaatctgtttccttcaatagctaaggcctagtggaatttcttagggtaagctttagccagggtcttacattctttctttagacacagattagcaaggaccctctgagggcacattcagaggatctagaaaccaacatgagtgatcaggagaaaagggaaattgaaacatcagtggttgactctggtgtgtggaaaaatgagtgggcctgagtccccgagggacatagaagatggcattctcacttatctgtctgccacacccaaaaatccttccctggtattcattgcacacataataaatgtttatccagtgccagctacatgccttgcactgctttgggcacaggggagagaactatgaacaagacagtcagagcccttgcctttaaagagcttatatcctaatagcataggcaatttaaaacacatgatttgaaatactaattttggctgggcacaatggctcatgcctgtaatcccagcattttgagaggctgaagtgagaggatcgcttgagctcaggagtttgagaccagcctgggcaacagagtggaacattgtctctacaaaaaatgaaaaattagctgggcgtggtgccatgcacctgtgatcccagctactcggaaggctgaggtgggaggattgcctgaagccaagaatttgaagccgtgattatgccactgcactctagcctgggtgacagagtgaggttctgtctcaaaaaaaaaacaaaaaacaaaacaatgtaataatttcaaatacgttaagtgctatgctggggacacacaaggggctgaggagaatgaatgcagggaatgagtgatctttagctagatggctcagggaaggctcttggagtcagtgtttcagcaaagaacccatgtgagatgctggtgactgtgcaaggtgtggaaaggcctctgtgctgcaggaactgaagggccagcctgaagaggtatgcagaagaaggaagagtgcatgacaggaggagggggaggcaggcaagggccatgctcacaaggctgtgagaagtcatttctccctttcatgcaggggaagggcatgatccagctcacatgaacagaaaagcactttgccactatgaggaggatggattgtaggaggccaatagtggaagcagagcaaccactgaataggttatctcagttgtccaggcaagagacaatggtggcttgagtcaaagggatagcagcagagagggagagaaaagacatttgagcttgaatcaggagaatttgctgatgggtttgatatcagggagtaaaggaagggttccaataagtatgaagctggtatttgaaaccatgagaactgatgagctgacctagctgatgggaagagaaaagcattccagaaaagaaatatgtggggtttctcaccctgtgacctgcatgggcatctgggcaggagtacacacagaggctgtaacccacatcatgggggcctcatgcacagatgttggacacttcagcccactggtacacagcccccaacccctaccacctgcctctcacaaagcactcattggctattaccccaggacgaacatgggaaaaggcatcaggcaagtcctagaatttggccttgagctttttgggtggaaattacagggccccaggactccaaagagtggtctagaagagagagtgtgtagactgggcaagcgtgcccctcaaacctgtgggctcctcactcatctggctaggatcagagcaggccaggtcagggcagaaacctccaaagcatgagacacggggcagggccctggctgccagatctaagggaggtactgcgctggttgtagttatcagagtaatcaaggccatttctccaggaagctgaggtacaggccctaggaagggagtgtgtgtaactcgccctgccaatccctagactactgctacagattacccaaagaactaagcgtagaactacatttgatccagaaatcccactactgggtatctacttcttgtcttgaaaaagaaataattataccagaaagatggctgcactcgtgtgtttatcatagcactattctcaatagcaaagtcatgaaatcaacctaaatgtccatcaatggatgaccagataaagaaaatatggcatatatacacaatggcatactattaaaccataaagagaataaaatcatgtcttttgcaaaaacatggatggaactggaggtcattattttaagtgaaacagctcataaacagggtgacaaatactacatgttctcatttatgagtgggagctaaataatgtgtacacagggatgtagggtgtagaaggatagacactggagacttggaaggataagggagggaggtgaacgatgagatattccttaatggatacaatgtatgttattcaggtgatggatatactaaaagccctgactttcccattactcaatatattcatgtaacaaaattacacttgtaccccatgcatttataccgaaaaaaaagatcccttactacttctacagtttctaatacatggtcccgcacctaactccaccctgaccatgtatgtcataatgggagttggcacccttgctgcacttgccaaaacttatactggtgggaagaagaaaaaatctgagatacagacttaggtgagatgaaaaccccagttgcagaggctacttcagccaggttagccagaagatctgaggacaggttccaatgggcatctgatgtgtgttcgaacatcaggtgtggttttcataggtgctggggagaggccaccccccaggctgtggtcaagatgggaattccagacatgagtggtgtgcagggaagtgtagagaagcatagcttctgttggtctgttcgttcaaggcttggatccagccaggtactgaccagctgaagcacaggatccgtccagtgccctgtgaccccaaaggttgggagttagcaagagttggttaaggaacttgaggctcagggctgccttcccatattagtgaattacaagagtgctaggtaagacaattcatattcatttcctgaagttggtcagtattttgggatggtgagggtactgaggctgagatacatttgagcattcacagtgcatcgttcacatctccactcttgggactgctgaccttgagttaatttcctgctctatagtacacggctaagttgcttgcctttgacatggttggctcaagctgaggcagggctggaggcgaagcccatcagcattcccttttcaaagtctcaaggactggctgccctcccataaattccaggactggtgaccagaccttattcgctgtccaaatgatgaaatccttagctttcttcatctacagagcaaattcacaacaggcagatgtcacatacaataggactataaaaataatacagctgcatgacactttctaatttgttcctttttgtcttcatggcagccccggtacccgtgtagtcaaagagaggtaggactgtgaggaaaaggtactgcgagccaggaacgacatgtctcattccaaaccttggttgtggcatattttgtggccttgggcaagtcacccaatctgtctgctccttctttccaaaatgtgaaacaaactgaaaaggggctgggagaatgcattagtttggtggaagggtctgggccacttgtttccatcagtgcaataatgacctctttctatttacaagaatggctgctctcctcatttcacttttggtagtcaagtggatttgcaagtaaatgggagctctggtgacaatctgtggagcattctaaaagcccctggtttgcattatccagagaaaatgtcagggattcttgacagtgttccttaaaggggctttcaacaggactcacttcaagactcccatgaagcaagttttacacagaaatgaaattatgctccattcctgttgaaaattaaggcaacaggaaatttgtgctttgaagtgtggccttgaactttatatgttcatttatctcaaatgactgactgttgcctagtgcattgctctgtgatccatttaaatgcttaacaaacattggtggccaggtagatggatgaatggggggctaaatcatagttagtaaaaagtcaccaattgttaagttttcccctagctctggaattctcaccatttggggttcaggattctcaggcatacttgatattaacttccatccatcctcttttacttcagaagggttcaggttgcatttggattgaggcaaaaccgaaagtagattcactgtacttctctgcagctaagggaggacagtaaaaagtactaccatgagatatggcttacagaaaaagaaactgaggtctggagatgccaagcatcttagctcaaccttacccctggatggaatacacagcttcatgtgatgtgagagtcactggaaatcccctgtccccaaataccaggctgccattgtgcttagaattctctggatgctcatagattttctgtgttgacacgagaagtcaatgtcatttattaatatcttcacaagatcactctttcagattaacttcctagtctggacacaggcccagagaggagcctggtggtaacttagtggtcaccagaccacgaagcagcccagacctgccacggggtgaccctggagactccatgtagactcatggataccctctccccattctgccacggaggtactgaagacacactccttcctcatatacccagacaccatccctgagaggagcaaggggagggaacagaactctgaacaactaagtattgtatgtaagagagactaaagagtttcataaggagactatttaaattatgataccagactaggcttctcatagtgtctaaaagccttactactcaaagtatgagccccaaaccaacagcttcaggtggaagctcattagaaacagactctgaggtcccagacctgagactccagacctaaggaaacagaatctgcatattgaccaggcccctagggggttcacagtcacattcaggtttgagcagtgctgatctaaagtacagaacccttccttgtcccctccccattgtccagtaagggcaacagagagcagttatggggcaataccaaagtactttatctagacatcttcgtggcctgaagttaatttgtgaccctgccatggttgaatgtaaataaagagcaaactgaagagatgggtgaaagcttccagcacccttctgaatcgaaagcagcaggtgaaaaaaaaaaaacaagctggcaactgggtgttggttcacatgtcaactccctcttgagtgctgtgttgagagggattctgaatcacatcaaagatcagtgggaaagaggccacacatgccaggttagctatgactgcattggtgagggatgggagactcccatcataccttctgtgatggttaatatgaagtgtcagcttgatcagattgaaggatgcctagatggcttgtaaagtgttgtttctgggtgtgtctgtgtggatgcttcctgagaagactcacatttgagttggtggactggaggaggaagacccaccctcaatgtgggtggcagtgcggctagaacaaagcaggcagaagcaggcaaaagtttgcttgctcagtcttctgactctctttatcttcctatgccagaggcttgcttcctcccctcctgcccttggacatcagactccaggttcctctgcttttggattctgggacttgccccagcagcttcgcagggactcctgcaccttcagccacagactgaaggctgcactgttgccttccctggttttaaggctttcggacttggactaagccactactgacttctctctttccctagcttgcagacagcctatagtgagatgtcatcttgtaatcatgtgagccaattctccctagtaaactcatatatatatagtaaactcatatatagaaagagtaaactcatctatatatattaaactcatatatacatagtaaactcatatatatatacacatacacatagtaaactcatacatacacacacacacacacatattatatatatatatatatcctattggttttgtccccctggagagccctaacacatcttccccaatttgccatccttgagggagcaggtgtgccgagaaggaacaatttgatctcatctgacagaagtagcaacaggagaagttttaagtgctctctggcttttaaagaaagtttgtgaggggaccaaatggccacatggtgagcctgcctcaccttaggagagtcatggccctcattctctaagcctgctccttgcttggggcctcacttatttgactttgtactcattaagatgggggcggccaaaaggaagggttttgctaagcatggtgtcagaaatcaaattatcagggccatgcttaccctgctagtgaaaaccttgctttcataagtagtgttttttttttctaaagagatggggtctcactgtcttgtccaagcttgtcttgaactccagggctcaagcaatcctcctgcctcagtctcccaagtagctgggattacaggtatgagcaaccaagcctggctcctcataaatcttagaatcacctgattatataggatttgggtccctcttgaattttgccagcaaagatatttttgccgagtcacaaatacgttttcttgaaaatgtactgtttaaaagaaattccataattaaagtttttattgtttaaatcagatttcctgtttccttcccttccttatggcattatagtaagggtactgaagtgggagtggagaagatgtgtgtcctaaccctgatcctcctatgtattagctaggtctatggggagttactaaatccctccaaccctcagtttcactggtgactgatatatactaagcaatcaatacttttttaaggaaatcaatcctagcctgctctataaattttgtttagtttgagtacttatcattgttaatggagccatttctttcgtctgtgaaattttcagagcatctggcagatgctggaggtgggaggaaaatggatctttgcagctaggatcattcttcttctgccttgaatgatttcatggcacagagctacccagaagcaagcgaccacgccagaagacccctcaaggtccctagcatctttaagattatgtgatttcctaaataaatgtgtgtggttgaagaatattaatagaagtagaagcacaacaggaatttgcctctaaccctcccccccaaccaccaagtagaaaaataagcaagccaacaataaaggctctttcagatggccatgccgatgccccatccccagccagatcacaagagcagatgaggcacactggatgccttatgtgctgacagggctgaggtgctagttctgaagttcccagacaaactgtttgcttcctgattccaaggaatccattccagcacccctcataagcaattacacttgctggggcaccataagggagcaaatagtgtcctcctccccaaattcatatgttgaagccctaactctaaatgtgactgtatttggagacaggacctttaagaggtaattaaggttaaatgaggtcacaaggatgggtccctcatccaatatgatgggtggccttataagaagagaggtaccaggggtactttgcacagaggaaaaattatgtgaggacacagccagaagatgagtgtctgcaagccatgaagaggggtctcactagaaaccaagcctgttggcacttgaacttggacctctagcctccagaacagtgaggaaatacatttctgttatttgagccactccatctgcagtatttcatatggcagcccaagccggccaatacagaggtctctagcaggctgggggttgggccccacagctacaacaggcccaccctggacagccagggagtctcaaggttaatgacttaaggctgactcccttcccagtgagtggggcaggaaagagggagaaggctgaggtccctgggcccatttcctgcttccaactcgatttggatgctgagagcagggatggcagatgggagagtgacgagctcctcctgctgcaggtgattcatagggcatctgggcacgcggcccacctccagcaccagtgggagctgatttcaaagccctccgctagcctgcactcagcacatgagaatcacatgaggctgggaggcagcaggagaaaggggctattctcatggcccagggaatccagtggcgaaactcattgcatcttgcttttgccctctgtggcctttggtccatttctccattagcctacttagggcagccgtgtttatagccctatttgccttcaacttgtactagctgaattcctgcctcactttcacaggcatcctgaatctctgcctcttttgggtgacttctataccttccccatggataccttctcttcaccaaaaggagccccacaccttccagcaggaccctgggaagtttctcccttacagcagagctacattctggccacatcttctggcaccttatggcctattcagttgggtgaggctggggctccctgctttgtactttaaggattcagactacatgaagatagaataactcggctctttggctctttccccaaagacagtctacactggggtttttgacccatttcctcctgtcttttatctttgccacaaaatacttggtcaggacacttggcactggaaatctatcatgtttcaagcaggaagtgaagggcccctttccttggggctccggatgttaccagcatcatctgaggcagatggagatttgatttcctcattgtccaagggcttctctttcttctgggcaccctgaaggcattataaccactcttcccttccctttcttgctcctttcttttctcagggaaggaaactgagatttctctcctcatgagatttcttgttacacacataaccctgatggcaacaatggtttaccagaacttgtttctgtgctgcctggtacccgtccctctccgcctggtcgggcattatagcagcaggagtctggagagacttcccagcccccagcaagctacccgcacatgtccagaagcatgaggagcaacattaaccttttaggagagtttccagggcaaatgagacagtccatggagtgttatttatgtctcttcttttcttcttctttttcccccttttggaagcagccatttggaatggacagaatgaaacagaagtcaaagagctgtctacacgtccttcccaagctataattaagatggaagctcatttgccattctgaggattggtgcaatcaagcatatgacagcaagattttggaacatttttatcagttttggaaccacagctcctccatggccaaatttctctttatgtctcaggtttcagagcatggcctaatatttcccgtacagacaggccgctccgctgcccttctgattcagctgaccactgtgcactgtagcgacgtgcaaggggtaggagtggacacattccagctcgctggggtttggaacggcacctctcattcccagagaagggattctctgtggaggctgagttggcagtgctcaagcttgccttgcggttggcacgtaggccatcagcaatcatctgagtatcaacctgccaagctgaggccgtcctggggcacagagatttattgctaacagaggaaagaaaagaaaccatttccttaattctgctttgcaggccactctcatggaaaggaactcccctgctgccctgatcagttcaatatctaactcatcatgcctgtgttcttccccagcagctcaggccggtctgctaccaggaacaggtgccaaatcagagtgtggaattttcccagcaggccccagggtgtgttgctgccaaggcaactgtggtagggttggggaataactagcgaaccacaaatccagaaaaggaagaggaggcctccttttcggcttgggccaactcaggtacaggctgtcccttgaggaaagctgtgggacacccccaacaccaagtgccaaggccagacaaggccagggcaggccaggctggaccctacgggcagcttgccagacctaggttaaccagaccaggtaaagacaactgagaatggctgcctgctaaggccacgcaggctctgcccaggaggagtaacaaaaaacagctgattgctaggcaagacctagagacctgtgttcagtgaacaatagcggtgaggatctgaagtgaggcttaaatctaactgggtaccagggaggaagcagagctgtgtgctacatggaagcaggcctggtattcagaaaagcaggaacaaagctagtaatatacaaagagcagagagtagaaacagagaggctagttggggccaatcagtggtcaatatccattggcattatctaagagaacacattcctcctcctccttgtgaagggagctctgcccatggccaacacagcacgcagtagccctagacaaatggagccctgtcatcagagttctcacctgcctttacttgttctgggccccaaaatcttaactgcaaatctgacagcacagcccatgtgagtgggaatgagcgccgtggggtgagtttgccacagaaacaggaagaggagagttagggcacactggcagtggccagggttttgctcttcctgaggttttgcttaacttggagatttctttaacttcacaaagacaattaaatgttttgttgggaatgactgaggtcataatttgaaatgagaaccatagttttaaaaccttgctctacgttaatttagacaacaaaattgtccacagcaaattaagacacagaagtccgggtcttcatcactaaacaaatcaggtgctcttcttcagtgcaccagattattctgttctcatcgagttttgacttaccaacttctattgttcctcttccatgtatacactttttgatagaattaagatttctctggtttgaagtctatgttgaaattcccactgggctgaaacatggataccatgacactccctgcattccaatatcaaacatccctttggtagcaaagcttgaggttttcctttctaaccgttattaagtaggtatggaaggatgttgttctggccaatggccttttaagaaggttgaacaaagctatttcctcttactttttaaaggggcacagcaaggagtgtctaatgtttgtatggggtctaaaatctcagagtttgggatggccacctagtaaaaagaacagtaaactcacacttcttgagtactcaggtgccaagcaccatgctggtgctatcctgtgtactatgtcattacatccttagaataacctggaaaggaatcttcactcccatttttacataggattatggtaacatccagagattaaatgttatagagcgcatatctgagagagctgacattggaacctaggtttcattctaaaccatggggattctggattgccctgctggattctgtcctcttggtggtggctgttttgaactacctgtttcttcgaccacttcgtgctccagctttgcaacttgaagcattagctacattcataattacataaataaactgggcaatccatttggaaaagagctttatgttctcattttccggtagttattgttgtttaatattggatctataacttaaatgtggaaggtactccagcaaaaattctgattattctacaaagtttatggcccatgatgagaggcaaaaaattgcaacataaggtgacctcatcaactcctccttttccattggcaggttttagaagttctcatgtatccgtgggcatcatagttcttgccaggaactgagtccatttttcctctactatctcctttttgttttcagctacccattctttttcatgtgggacacacagatctcttgactctgggatttcatctccatatggaactatatttttaaggcacgaatagtttcaatatatctaatagaaagagctctaggtatacggaaatatgagaacaaagagattattggctgatatcagaaatgattgtaaagagaccttcaaaaccccgacctgtccacaggaaacctgattgttgcagagggaaaacagaaccagtatttgggtctgaaatcagacaattagaggccctcaggaaagtatctttggagaatattaactcttgaataaaaacaccaaatgacttggggcacaggtgctgttttctatcacttaatactactgagaatctggatttgagatgaaagggaaagagctgggagatcgatgactgcctgcccaggtggtgttgacaaactggatttggatttggggcccattggcttaaaatcctggaatactaggttcttggccatgggtggtttacattttgcatgcacagaaagaatgtgcctggggagaggctagactttaaactcaacatagtgtgttgtggggaggaaaacagtcagataaatctgggaacacagttgccatagagcatggcagataaaaacatggaaagaagaaattgagtggaaaagtcacaagtgaaagtgatactgaaactgtcttcagtatcagtgcacattgtatggaaaattcacaagcggagatgggatgatgatgcaggcacctggtcctctgttactgatgcctgaggaaacttcaaagcaagggcatgccctatgtgggggaataaagcaggaggccaggaggctgacaggcaggaacaggttatgaaattggtcccagagtggtttgcattgattacattcaagaaggaagctgagatcttctccaggttgccaggggttattgagaactggctaatgtatgagagtgggaggtggtgagtcgagcgtggcttcttaaaaggctcaggactgggccataaacacattattgggtttaatttcacacgtagcaataaaattttggtggagagaggctcaagcaccaggtgaaggggtttcttattgactcatttctttactctacaaatatgaattgagtgactattttattggggtgcagaggatagagcactgattgagagaggcaagagcctttcagcgatggagctcactgagaaatgggagagggagagacaaaatagaaacagaatagcaatttaaatacataacatttcatgtagtgatatgtgctgtgaaaaaaagtgataaggtggactgacagtggaggcaagtgcagtcaatcttagatggggaggttgtcagggcaggcacctctgagaaggtgacataggaggtgagttccgaattgtaagatgaatccacagtgttaagggattgggggttggggggcggggggcagaaattatccaagcagagggagccacacatgatggcactgagggagaaccctacctccactgtttcaaataggaagtaagccagagtgacgggagggtggtcagtgaaagggaggtgggaagaaataaggttagaaaggtagacagggccagatgatgtggaaacttgaaagtaacagtgagagtttggatttctttctaagtgcaacaggaaggcattggaaggttttcagcagatgagtggcttgaattaaacttatgctttggaaagatcatttgctgcatgttgaatggattgtgcaaatgggaagatcgaaacaggagcactagttaggaggttgctgacagtggcaccaggagctaggatggcaggaatgtagatggagataactaggcagagtttggaatacacttcctccattcactcacatgccttagttctccacctgaggtatgtctctacctaaatgtcaccttttcaaagagacctgtcctggccaccctatctacaaaagcaaaccccactccactccactgccactccctgcccccgatcatgctccagcctcttatcccaatttattctccttcatggtgcttgtcatctgatattgtgttacatgtttacctattcatatatgtggtctgcataactcactaaaatatatgcaacatggagcctggggtttttctctttacttctgtaatcctaagcacctagaatagaaaggctaagtgggccaggcatggtggctcacgcttgtaatcccagcacttagggaggccaaggcaggtggatcataaggtaaggagttcgagaccagcctgaccaacatggtgaaaccccgtctctactaaaaatacaaaaatgatctgggtgtggtggtgggcgcctgtaatcccagctactttggaagctgaggcaggagaattgcttgaaaccagaaagcagaggttgcagtgagccgagatcgcgccactgcactccagcctgggcaacaagagcaaaactctgtctaaaaaaaaaaagaaagaaaggctaaatgaacaccttggagatgaagccaacagacttgctgaaagattggaagtaaagactgaagggaacaaagaaggtaagttcatgactcagtttctggtctgaactagttttcagacacagatcccattataagaaggagatgctttcctgggagacaggacactgcaacaccacagcaaacagttggtaatgagtcacgcagtccttcccaaaagggtcctaccatcacttactctggtagccatgcactggagaaaggattaactaggcattgtgaggatgggagaatgctaatacaactcatttaatgggtgacataggcttccagctctgagacaggcccagagcaagtaagagctctgtagcaggtccagactgtggtccaggccaccctgctttttggacaatatgacccagcagactttataatatcagagacatccatggtaagaaaagctgtcatgtggtgtttaaggcaagactagtaggagaatcacaatatagactccaagggttttagatcgaggcctaccatgtacagcagagaatcatacacctttcaaaagataacaacttgaatgctactcgcccttggtagagatgaaatccctgacaatggaacagcaagtgaacatgtggtcagaattgcccatgatctggttcctaacagactcaccaagtcataaagtcaggtggatcagccacagtccattgtaagatggaaatagcacatccaggataggtcacaagcaaggccagaaggaacaaggaagccacacaagcaggtgacttggactcccatgtcaccccccactgtctggccacatcttctctcagctcacacctgtggctgcatgagagtcccttataaccaagtgatggagggaaaaaaaaaaaaggctgagcttgtggatgcgagccaaaagtgaatgctgctaccttactcagagaacaccttgaaagacagcagtaaatagaaatcctcccaacaggcagagcctcaggtggtatacctcgccagctacttcatgtggaaaaggaagtggcctgcagtaagaatacaagtgggtttatagacactagtaaacggttcagctggttggtcaagggtctggaaagagaaagattgaaagattggacaatgaaatctgagaaagaggcatgtgaatggtcttattggaatgcacacaatgtgaaaatcattgtatccatactatccacctaccagagagcattaaccacaaacaaagcactaaaatatcaagcagacagaatgacttagccagttgacaccagcaagcctctctcattggtgagagtgctggcacaatgggtgtgtgaatgaagtactgtagtagcatgattggaagctactcatgggttcaacagcataggctgccacccacaaaagctgatctagatactcccactgacaattgtcagtctgccatcgccaggcccctgatatgacccagtccttccaggagttcaaccaatcacttgatggtaagttgattacatttgatcccctccacttggaaggaacagtggcatatattctgggtatgggtttgtctttcctgcctgcagggctatagcctgcagtactgtccaaaggcttatagagtgtctgatgcattgacttagcatcttgtgtaataatgcattggacaaaggaacccaagcagtggttctcaaagtgtggtctctggaccagtggcatcagcatcacttgggaactttttagaaatgcaagttcttgggtcccaccccagacttactgaatgagactctgaggcagagcccagaaatctttttttaacaagcccatcagttgatttaaaaaaaaattgtgggtacatagtaggtatatatattaatgggttacatgagatactttgatataggcatacaacaagcaataatcacatcatggaaaatggggtatccattctctcaagcatttatcctttgtgttataaacaacccaattgtactctttattttaaaatgtacgattaaataattattgattatagtcaccctgttgtgttatcaaatactaggtcttattcattctttttaactgtatatatttttctgtacccattaaccatgccccctatccccactcagtccttcttacaccaatgctagagaatgactgttttatagcaaagaagatgtgacagtggacatacaatcataaaatctcctggccttatcacataacgcatcatcaagaagttagttactagccaggtagaatggtgaaatggtctttcagaagcatagtacctgcttggagatattaccttgtatagatgagatgctgccttgtaggatatgggatacaacttctatctttttaaatcagaattccatgagagatttaaggcataccgaaaatgatttgcataactgttttctccattatcctatttcttccaaggatggtccacagctaatactaccctagactcttaggcagaaagttaatccgttttgtagagtggatgccttagggcattcgggattaatcatcttggagaatccttgctaagaatagcagccataaatcaatgaccatcgtattgtgctgtggccccagtaggtagaataaatggatctgggaaacacagtgtggctgtaagaatggccttgcttcccatcactcccagtgacccacttgggagacctctgcttcttgtccctataactctgggctctgtgagtttatggagagggcttctttccttaaacctcatgagcaaacctctgcaaaattcaacgttttcttctgtagcttcctcattcttctcagccttcacagaattgaagtgagttagggccttgctctggattaggctttggtttaaaggaacgttgtggctgctttgatcttctctccagaccactccaatattctccatatcagcaatagggctgtttcaatttatcataatttgtgtgttcgctggagtagcacttttaatttccttcaagaacctttcttctgcattcacatattggctaaatgtttgatataagaagcctagcttttgacccatcttgatttttgacatgctttcctcaccaaatttcgttgtttctggttttgatttaaagtaagagatgtgtgactcttcctttcactttaacagctagaggccattgcagggtcattaattgacctaatttcaatatttttgtgtctcagggaatagagggaaaggtagagaaatgggagaacagccggttggtggagtaggcagaacacacacaacatttattaagtttgctgtcttaaatgggtccagtttgtgatgccccaaaacaactgcaatagtaaaaattttttttaaaaaaatcatagatcacagatcaccataacaaatataataataatgaaaagtttgaaatattgtgagaattaccaaaatatgacacagagacaggaagtgagcacatggctggaaaaatggtgctgatagacttgctccatgcagggctgccacacatcttccacttgggaaaatgtggtacttgtgaagcaagtaaagtggtgtgcaataagatgaggtatgcctatatatgtaaagaacttgaaatcacacctatcacccagtaagcactagacaaatctaagccatcattattccccatgtaaatctttccatgtcaactgacaacagcaccaaatgactgtgatggcgtataatattctgtaatttattcagtctctcttcttttgaagagttttctcttttttccccatttcttccccctcatacaggcagcattgcaatatatatctgtgtacttatgtcttgttgtattgctgtttgatttctataacattaaaaccgaggtggatggttggcgtgaaggctatatgtatttttaattttaagaaacgttgtcattttgcctccactaaataaggctgcaagtaagtcttcatattttctccagtaatatataaaagtacagttttccctacatgctcaccaatactaggtagtagagttctttttaacttttgccatagaaattgacatttcactaattttttttttttttttttttttttagatggagtcttgctctgttgccaagctggagtacagtgccacgatctcggctcactgcaacctctgccccccgggttcaaacaattctcctgcctcagcctcctgagtagctgggactacaggcgtgcaccaccacgctcagctaatttttgtatttttaatagagacggggtttcaccatgttggccagaatggtcttgatctcttgaccttgtgatctgccctcctcagcctcccaaagtgctgggattacaggcgtgagccaccatgcccggcctcactgattctttaatttgcagctccataattttagggaattcaagcaccctttcatgatggttaaccatttactccatttttctattgggttgcttgcatttttcttgtcaacttcaaacagctctttgtatagcatatatatcaacctcttatttgacttcccttaaaacaacctcagtgctaaccatggggtatagccattgctgaagtttgggtgtttgtcccctcaaacctcatgttaaaatttgatcccctaaagccttcctgcctaaatagaaaggttccaggtactttcatgtggtaagagttcaaggtcttttctgacactgccttcccagctctgcactccctactccttttctgctcctaaaactccctccatcttctgatttttgactggaatgcttttctcctgccgcttcctctgtacaaaccctattcattcttaacgcgtctgtttctctgaatgctgtcctgaccactctagcctgatgtgaactcttctcattctggactctcacagtaattattatctgcccacgcatttggcaattggtcattgtctcctcaagatcctactggaaacaaatcccccaccaaaccaccttaagcaagaagggaaatttattatctcgcacagcaagagctctgagttaggacatgctccgaggttgatttgagttaggacatgctccatgttttctccacactgccatcctatgtctgctttcttcatgggcataagatggctgtcaaaagcagctagggcaacatacttctttgtttatacctagtggcagagagcaggaactctctccccaggcagtgactcagtctctcctttcagtctgattgagccaacatcagtcgcatgcccattgctggcagtagcattgcaaccgttactggtccagcagtgggcatgtcaccaatgttggctcaatcagaatgaacatgctaagtcttatactaattaggacctacacctgaacctcccccacatcacctaggaggagtggatactttaataaagttggggtctggtaggaatcaagaaaaggggagatgaatgtcatatgttgccctgtgacaagtatttattagcttgaattgctattaacagcttttattgtcatcttttcatatttttcatatctgttcctcccaggtagattaaaacacgtgaggcaaagcctataccttgtaactcttcaattactttcttatagatgtgccagtaaatatgaattggttggatttgacttctcaatgatacacaatgattctctacctggactaacaccacagaggatgccatagaaacttctgagatttcgatgataaatataaaaagttgaagctttggggagcccaagccaggaagctggaggtctgtttgaaatcctgttgagctcctcccctacctctgctccagaaactacatggatattagcatcaacactaatcaaaagaataagatcaaggatactgaagagctgcaatgcaatagatttctttatccttgatacttagatctgagcacagttcactgttgagaactgcacagtttgccttaactagaaagtgtgcattttcttatttcctctctgggatgacagtgatcaccaaaaaattgttatttaagatacttcatttattcaatcatttaacaaacatctgctttgaatatctattaccaagttctgtgctaggaacagaaaatacaaaatttcataagaaatgatttctacccttcaattgctcattaaaagagctgctaccacttcttcaaatttggtagtagttatttctgtgaggtcactgggttcagaccttaacctatcaactggagtgtctgctctagagctaagtgctttgctgtggacacttgctattttggggataagaagtatgatctcatcttctcttcgatgtttagcctaaggtgattcacttcattcagctttaacatcactaaaatgtgaattcatactattagcgtacttctagtacaagctataaaacccattacccatgtgtaaggcataattctgacagcctaagctggagaatatcattagctaaagtagagtaagattgggtgaggtggttgttaagaggtttctgaatgagtctgagtcaggcctccagggctaaatttattaatgagtcattttccttgcctagcagacactgtggcagaaagtgaaagaggaagaagccattcgacgtctgtttttaaaaatgtgttctgt

SEQ ID NO: 116 - DNA, 12116 bp, Homo sapiens
gatcactggagctgacttccgcaatcccgatggaataaatctagcacccctgatggtgtgcccacactttgctgccgaaacgaagccagacaacagatttccatcagcaggtaacgtttgcaacttcctagatcttttagcttttcattcctgtcaattctctgagtattagggatgtagtgacttgaggatcacaataaacttttagcctctgcagatgaaaacagagatgcacttcttaggtcattccctggctaaataaaatctgcctggaaatctgtagaattccttgtatgatttatatatatacatacatgattgttagtaaaagcaaagtatatagggaatcatttccccatccttcaagagtggcctttctgcagtgttttctactttggccaacaaggatcaaaacggttaactccttagtgaggaggaggagagtggtatggggaggtagtagctcagtgcttcctgttcactgagacatctcaaagcccttaacactctagtttttaaatgtcctactggacattttgccagtttgcaaaattacatgtaaatggactataagcaattgtgtaagccatatgtcatgctgcaggctgcaaattgttcttaaaatggaggatttgtaattaagaaagccaatgcaagaaatgagtgaagctaactagagtaaacttatgaaaagctgtgaatttcatcatcatagaacattgcttttcagtctgaacattcttctaacaaaccttggatctgaggcttcttgtcctttgcggcagccacagtgggtttttgttgttaggggaaaaataaaaaaccttgcccgcagcatctggttaagattagggcagtttcctgcctaaggagggaagggagagaaaaaggaagaagaaatgcataaggagaatgaggagatatacaatgtctcagaaaacaggaaacattgtcctattttcccttgtcctcttctgacaagatctgggaaagtaccagaatttaggcacgaaagagaagaacgcctcgaagaaatgatcaggaggcaaaacttagacggaaatctctcctttgtgtattctgaaccccactaccaccttgctatttgtctgtctccaagcctgctagggaccctggaggaaacgcactgagcccattctgattgtccagtttctatcccccatttctggttgtgtacgtgtgtgtgtgtgtgtgtgtgtgtgtgtgtgtgtgtgtgtgtgtgagagagagagagacagagagagaaacagagagagtgtgtgttgcctaaatctcccgagagagagagagagagagaaagagagaaatggctaaatccccctagatcaaagtccttggaaccagatgtaccagcatcctatctaaacacaggcccctcctgactatcattgttttatcaccctttttccgtctacctttctcttcctcataaagcctagttttcctctgtttccctgccaaatggaagagttttccctaactacattcttctgcaggatgtgggggctcaaggttctgctgctacctgtggtgagctttgctctgtaccctgaggagatactggacacccactgggagctatggaagaagacccacaggaagcaatataacaacaaggtgcctggggtcctggagggggcatggcaggaaggctgagacctgagctctctcatcttagcttccagactcccttcttcaatccaaatgctttattccaagcaaatcagtccctcttccctaactcatgttaacatacggttttcattcctatgcttcaaatcatcctctgtcaaactgtatccttcctttgctttataagtgtgttacatttctcttttgggaagagttctaagattaatgctgttaatctataagcaatttttctgtctctccagagctttgtgttgtatttgtttacatattatctcttcttgcaggctcttaattccatggttagttccccaactaaactgtaaacttttatgattgtgagtttcctttattctcctaaaacccttcacaatattacatatgtaactgtagacagtctatacaagtactgactatgctttgtttaggtggatgaaatctctcggcgtttaatttgggaaaaaaacctgaagtatatttccatccataaccttgaggcttctcttggtgtccatacatatgaactggctatgaaccacctgggggacatggcaagtatagcttcagctcctgtcccacctgcaccatttgctttagttccctgctgatgcctggcctctttcttctttgtcttagaccagtgaagaggtggttcagaagatgactggactcaaagtacccctgtctcattcccgcagtaatgacaccctttatatcccagaatgggaaggtagagccccagactctgtcgactatcgaaagaaaggatatgttactcctgtcaaaaatcaggtactctcctttcttctgggtgtgcatatgtaatctggcatgaccttttcctttttctgctgctttgttcttgaggtgaaagggcaccaggaaaagagggcaaggaattaaggtacatctccccattcccattctgttatttaacctcatttgtttctgtacatttgggttgtttctggtttttctttttcttttcctttttttttttttttttttttttttgagatagagtctcactctgtcgcccaggatggagtgcagtggtgcaatcttggctcactgcaacctacacctcccgggttcaagcgattctcctgcctcagcctcctgagtagctgagattacaggcacgcgccactacgcctggctaatttttctatttttatagagatgcgttttcaccatgttggccaggctggtcttgaactgacctcaggtgatccacctgcctcagcctcccaaagtgctgggattagagtcatgagccatcgcggcctggtttttctttattacaaatagtgttgcaataagcacccttgtgcatatgtttttgtgcacatgtacaaatatttatgcaaaataagtcctaaaattggaattgttaggtcacaaataatcctttccccccccccaaattttttttttttttttgagacagcgtctctgtcacccaggctggagtccagtggcgcaatcatggctcactgcagcctcaacgtctcaggctcaagtgattctccaacctcagcctccctagtagctgggattagaagcacatgccaccacacccagctaattttaaaaaattttttgtagagacagagttttgccatgctacccaggctggtctcaaattcctgggctcaagcaatctgcccgcttcggcctcccaaagtgctaggattacagacatgagccaccatgcccagcccaaaaaagtttttgcaatcttacattcttactagcatgagaatgtcagttttttcacaacccaaacaacacaggattgtatcagcaagataaacaattgatttaacgttcatttaacaaacactttttgacccccagaacctaccagatgcagtgttaggcagcagagactcaagatgactaagacacaacctgtgtcctcaggaaatctcaatctaaaaaaatagaacaggaaagaaagaaaaatctacaatctagctgcacaaacaataatagctaatactttttgagattttattgtttgtcaggaacttcttaactctttacatgagttaaatatttaatccttataacaatattttatgcatagagaaactgagacacaggcaaatttagtaacttacccggggtcacatagctactgggtggcaaagtcagggttagcacccaggacaaatgcctccacagctggtactgtgctctgctttactgtagctaatagtaaaaatggtagcaaaaatcaatagcagtagaacagtgcaacagatattaagcggaagaggaagactcacaacaatgacaacatttgtgctgaaatttttagaacacatggaatttcttcaggcaggtagagagaagatatagaaaatgtaaacagcaaagattgatagtttctctgtatgcctttcagggtcagtgtggttcctgttgggcttttagctctgtgggtgccctggagggccaactcaagaagaaaactggcaaactcttaaatctgagtccccagaacctagtggattgtgtgtctgagaatgatggctgtggagggggctacatgaccaatgccttccaatatgtgcagaagaaccggggtattgactctgaagatgcctacccatatgtgggacaggtgagattgctccacacaattatacagctctgttggctcctccttccccagcatgatgttttgtactggaaacaattccagaaatactgttttctgttatcctatcctgctttcttgatggaataatttcccacagaaggccaagaagatttccacaatctgggggaatttagggagcttaagctactatagctcctatttgcatctctgccatggagagaaaacagaggctaggctacctaccccatagacttccgagctgggttctataaccctctgctcaattcctcactcccacaacaaacccacaaacccaccatgctattttcacaaattgtgtggctttattttatatgatctcagtgtgagttttcagaacatttcagcaaattatgtaagtttacatgctaacatctataaaatgagagaaaaaacaagttgcttcatataagagataagggattaactcagttcctcctgcatgatcctctagtcataggaaggaaatcatatctgaaagggaggcaacctgaggggttttttatacacatagggctgggtctgatagacaatataatgtagggccttcacaacagaaacctctgaaacagggacagcaagtttgagaataaaaatgatggctactgtgttctaagccgtgtccttagtgcattttttctttttctttttttcatttaatctcataacaactctgttaggtagacttatcttgaatgtataggtgaggaaatggacacttaaggagataagacagtataattcataccactagtatgtaacaatgtaagatgtatctaccagggatgtttatcttctgcaaacattcctaggtatatctcccatgcacatgtgcaagaatttcttactaggatataatgccttggaactgaattgtctgggtcttagggtatgtctgtcttcaactttactacacaatgtcaaattgtttgccaaaatatttggaaaaatttatacctgcaatgtgtaagaaatccccttcaatcacctttttatcagtatgtttatctggccatttgcatttcttcttcagtgaattaactgtttttatctcttgctcatttgtttttctttttatttttttgaaatagggtcttactctgttgcccaggctggagtgtggtgatatagtcatagctcactgcagcctccacttcctgggctcaagcaatcctctcgcctcagcctcccaaatagctaggatataggtgcatgccatcatgcccaccaatttcaaaaaacctttgaaatttttttttgtagaggctaggcatggtggctcatgcctgtaatcccagcactttgggaggctgaggtgggaggatcacttaagcccaggagttccagatcagcctggtacaacatagcaagacctcatctctacagaaaaaatttttaaaagtagccaggtatgatggcgtgcatagttctagctactcaggaggctggttgggaggacaacttgagcctgggagttcaaggctgctgtgagctgtgatcatgtcactgctctctagcctgggtgacagagtgagaccctgtccccaaaaacaacaaccgttttttttggtagagacattgtctcgctatgttgccaaggctagtctcaaactcctaggctcaagcaatcctcccacctcccaaagtgctgggattatagatgtaagccaccatgcctggcctacccttttttttttttttttgaaatggagttttgcttttgtcacctaggcttgagtgcagtggcgcgatcttggctcactgcaacctccacctcctggattcaagcaattctcctgcctcagcctcctgagtagctgggattataggcacccgcaaccacgcccggctagtttttgtatttttagtacagacagggtttcaccatgttggccaggctggtcttgaacccctgacctcaggtggtccgcccgcctcggcctcccaaagtgctgggattacaggtgtgagccaccatgccccaccccttactcatttttaattggattgttttttctctttcttagcgattcttaaaagtttaaagagaatatttggatacaatactatgtatttaaaagttgaggtttgtcttttcattctttttatgatgtctttcaatctagaaaagttaattttaataggcctggcgcggtggctcacgcttgtaatcccagcactttgggaggctgagatgggtggatcacaaggtcaggagatcaagaccatcctggctaacatggtgaaaccctgtctctactaaaaatacaaaaaaattagctgggcgtggtggcaggtgcctgtagttccagctactcgggaggctgaggcaggagaatggcgtgaacccgggaggtggagcttgcagtgagccgagattgcaccactgcactccagcctgggcaactgagcaagactgcgtttcaaaaaaaaaaaaaagttaattttaatatagtaaaattagtaaaatgattaattttcctttgcaatttttgtaatgtgttttattcgtttatgaatggagaaaggtaagaaaaaataaaatttaaaaaagaagagatgtggccaggtacggtggctcacacctataatcccagtagtttgggaggctgaggcaggcagatcacttgaggtcaggagtttgagaccagctgggataacatggtgaaaccccatctctactaaaaatacaaaaattagccaggtgtgattgcgcacgcttgtaatcccagcaggctgaggcaggagaattgctcgaactcaggaggcagaggttgcagtgagccaagatcatgccattgcactccagcctgggtaacagagactctgtctcaaaaaataaaaagataaaaaagaagagatctgatagggcggccagataacattttaaagggatggtattataagtttgttccagcataatgcaggttattctgactttaaagtatcatcacataatatctttttgagtcaatttccaagatattctgtttcacttgtaattctgtgtaatttttggcaccaggaggcatcagggatttggagcacatggcagaaacaaaggcatcttgaaaaatatcaaggcagtagaccactgtaatcttaaaatggcatatcaaatgctgctattgctgttaatatttagataatgttagataatgtatttttttagagggtatctcactatcttgcacaggctggagtagagtggctattcacagcatgatcacagtacactaaaggctcaaactcctgggcacaaacaatcctcctgcctcagcctgctgagtagtagataataagttcttgtggatgcaaccttagggttctgaaggggtagtctgtaggaaaatgaattgctgaaaagaatacaccaccttaacatgggctattattcgattccataattgtggcttgccaatgaaacattgctaactacctgtaaaatatagtgttggaagtcataggctaaattgctaagttctttaatctattttagtgtcttgttatgtacttttatattttgtctttgatgagagcacaaggatcacaccagttcccctgatataggtgcagagggcccaggtcttccctctagctaagccttggccttggcctcctacccacacagcagctggtgccttcctgccccctgaggctaatacatactatgtggccagaagatggtttatgctttttaaaaaaatcttatttcagaaatctttccctactgttttcctcccacatttatgtcttaaaacacctgtagttgattttttttttttttgagatggagtctcgctctcgcccaggctggagtgcaatggcgcgatcttggctcactacaaggtctgcctcccaggttcacgccattctcctgcctcagcctccccagtagctgggactacaggcgcccgctaccacgcctggctaatttttttgcatttttagtagagacagggtttcactgtgttagccaggatggtctcgatctcctgacctcgtgatccaccctcctcagcctcccaaagtgctgggattacaggcatgagccaccgcacctggcctgtagttggtttttatgtgtggtggaaggcgggaatcctcttttcatattcgtttttctgaggaagaacagaccctctctagaaaccctagactgctgcctctgttagttcactggcatcactcaaaatattggttgagtttcttactcactgactcattgcctattgctttgtcctagtcctattacaatcttgtttcttccaggaagagagttgtatgtacaacccaacaggcaaggcagctaaatgcagagggtacagagagatccccgaggggaatgagaaagccctgaagagggcagtggcccgagtgggacctgtctctgtggccattgatgcaagcctgacctccttccagttttacagcaaaggtaagaagctgctgatcctatacagcactgtcttttatgatacaaacttgatggtttctcgaaggaccttgggtattttcagtacttagtttttgtattcacatggaggtggccagagagaaattaacaactgctgcagtatggagcagcatctctgtggtaaaccctcctgacacggatggaattcttcaaacagtctcctagactgggagatcccacagggtgacccttggattgcatagagcctcacgctggtagtttgtattctaggtgtgtattatgatgaaagctgcaatagcgataatctgaaccatgcagttttggcagtgggatatggaatccagaagggaaacaagcactggataattaaaaacaggtaatgatgggaacactacttttgttattcagtcacccttttaacactcaacctcacctccagcttcccgatattcctttctctgtcccaaatcaagaaaaaattatctcagagttctcacttctatcttctcagtcagaggctcttaattctcagtctgacacttaatggccagtgtgttagtccattttgcattgccacaaaagaatacccgagactgggtaatttataaagaaacgaggtttgtttggctatacaaagcgtggcactagtatctgctcagcctctgatgaggcctcagagcttttactcatggcagaaggcaaaagagggagcaggcatgtcacatagtgagagagggagcaagagagagagggaggtgccgactctttaaagaaccagctcttgcatgaactaatagagtgagaactcactcatcaccaaggcgatggcaccaagccattcatgaggaatccactctcataacccaaacacctcccactatgccccacctcccacattggggatcacatttcagcatgagactgggaggggacacacatccaaaccatatccgccagacaatagtgctcaattatgtgctgggcagatgctccctgtgtgcaaggtgcttagtgacatacataaaccaacgagcagatgacaccttcagtgagctcagagcccaataagacagacctaactaaccatgagataaagcagtacaaagaaccagcaggagctttggaattacgtatttttactttcttttgtctctaatgtgatcagtttcttagatggtttccattagcaatctgtctttaacagtaggggaacagcgtaaaggtttaatattcctttgaacagtttttttccttcaaaatacacttaagatacacgtatataagaacttgccaaagattgtgaagagaaacattttttagaaataagatataaacaaaaaaagttagtgtttactttcctatgttggggaacaaagaaaactccagggtaccttgcttcccatttctctttagcaccttgtgacttttggggaggggcagattgataacaattatagttttcctttcctggctgatcaccattaacctggcagcagcactggctaaatctcctgtccttagtgccctccaaggagcaggagccctagactctgggtcgctgacagactcacgcagtggtgttgttcaaacctgaagcaactttttatatcacagttccaactcaaggtgaacctgagcatcttcccaagtctcccacagcttctgtcctgtgttgtcccttctcttgactcccaggtccaagcacttaccctgttctttcatgatcaggtaccatgtgtggagatagcttccaagagagctgggaggaagaaaggacacacccgggcaggatcaggaacactgggggcccctggagaaggggagagtgggggagggtacaggttttaaataaaatgtgttgggtaattagagaagttgctggttggggaaagaggactgaaaacaattcaggaagataaacagacaatctctcctctctcctctttctcacgtcgtctctcttgtcttctagtctcgctactcatttccttagtaatctcatccactctcatagtttcatccatctctcctatggggtttactcccaaatcaagatcaccagcttcagcctctttcttatgctctaaactcacattttcaagattaatattccccaaatacagctctgatcatatcactctcccactcaaaatccctcactggctcctcacgatgatgggtcacagagtaaaggtgaagctttttaaccttgcagtaaaggtaattcaacctgatctcaatctgcctttccagacatctctcccactacaccctgttaggcacactgcttttcagctacatgatcctaacagtgccccacactttcctgcctctgttgttcatttcacacccttccactggcatccccttcccacaggtcgaaattctacttagccttttggctcagctcaaatgccacctcttacatcaagcctctaagattctcttgatcagaaggaatctttccctcctttgatacctacagtattatgccttctccctatttcttgactttaaactctttaaagttaaaaaacatcatattcatttttgtgtaccatcagtacctcgcacaatactcagtaaatattttaatgaataaataaactgagagtactaagtatttttcttgattggtcttacagctggggagaaaactggggaaacaaaggatatatcctcatggctcgaaataagaacaacgcctgtggcattgccaacctggccagcttccccaagatgtgactccagccagccaaatccatcctgctcttccatttcttccacgatggtgcagtgtaacgatgcactttggaagggagttggtgtgctatttttgaagcagatgtggtgatactgagattgtctgttcagtttccccatttgtttgtgcttcaaatgatccttcctactttgcttctctccacccatgacctttttcactgtggccatcaggactttccctgacagctgtgtactcttaggctaagagatgtgactacagcctgcccctgactgtgttgtcccagggctgatgctgtacaggtacaggctggagattttcacataggttagattctcattcacgggactagttagctttaagcaccctagaggactagggtaatctgacttctcacttcctaagttcccttctatatcctcaaggtagaaatgtctatgttttctactccaattcataaatctattcataagtctttggtacaagtttacatgataaaaagaaatgtgatttgtcttcccttctttgcacttttgaaataaagtatttatctcctgtctacagtttaataaatagcatctagtacacattca

SEQ ID NO: 117 - DNA, 219480 bp, Homo sapiens
aggctgcagaaaggaatctcctgagggagttattctgaagaagggaagttcctctggtctggtgtctactagaattgcttttccttgaaactctgccttcttctggaaggcagaaatctaacatgattcaatggctacagctgtggaagtgtgcagaggaaaggtgaaatcattatagaatactgaggaatactttgacagaaattatccttactctttttccattgaagtggggtcccctgaggtaaccagaggtgtgatgggaaaagcaaatcaagttattttttacctgtgtgccaatgttgtgattgtcataagtccaatgagaagtggatgcctgtggttttgaaggaatgtgcttagttcacagaacgaaaaggcttctcagttaactcgaagactaaaagcacacagattaaaattcagagaatgaggaaaagaaaatccagggaagtctgagtttcattggagcaagtatagatggttaggatatgatttcctggcatggtctgaaaaccatattctttcattccaaataaataaaaaattcttacaaagctcaagtgagtttaagtgctgcaccataataaaatggcttgatttgcagctgagacttggcacaattcatagactaaaagaagagcttaagaaaagctacaggcatttttttttttttttagtatttggggggaaaaatgagcaagtccccatgtacttttcaaaaaggcaaaaattatttatctcttggtatgagcaatgtaattaaaaccttttttttatgtttaggctttcaagaatataattattgggtattcttttctatgcttgtttcatctactctttgtttttaccaagggataaatactaaattccatgcctttcttgggcccttaaaacaatttattttcatgccaaacctctcattaagcctcctccctttctttttaaaatttattttttattgagataaaattcacataaaatttaccctttcaaaatgtacaattcagtggctttaggatgttcacaaaattgtgcaaccattaccactatctgattacagaacatttttatcatacccaaaagaaacctgtaattattagcaatcactcttcattttcccttcttctagcaaccactaatctactttctgtagatttgcctattctggatatttcatataagtggaattatataatatgtggccttttgtgtctggcttctttcacttaacataatgttttcaaggttcatccatgttctagcatgtatcagtatttcatgcactttatgactgaataatattccattctatggatactccttttcacagtattttaacaagccttattcttggtcttactgtggattataatccattgcagtgtattttatgttcataaaagaactaactgatttagtaacatattttctataattatggctttttagaattgtcttcccagaatggtggctcacacttctaatcccagcacttaggaaggccgaggcaggcggatcacttgaggccaggagttcaagaccagcctggccaaatagtgaaaccctgtccctactgaagatacaaaaaattagccgggcatggtggtgggcgcctgtaatcccagctactcaggaagctgaggcaggagaattgtttgaacccaggaggcggagattgcagtgagccgagatcgcgccattgcactccagcctgggcagcaagagcaaaactccattaaaaaaaaaaaaaaaaaatcttcccagatacaagttggaagagtctgagagcaatttcttcttagccagttattagaagagttattttccagtggattgtgttttatttttagcctgattcaaaagttataccagctaggaagttagatgaactatcgaagagacttagctaaaatcagctctaaagaaaattggaccagtattacagtcagtctccatatctcaggttccacatctatgtattcgatcaaccacagatcaaaggtattcagaaatacaaaaataacaataagaataatacaaaaaaatttaaaatgtagtataacaactatttacatgtcatttacattaggtattacaagtagtctagaaatgacttcaagtatagggaaggatgtgcataggttatatgcaaacatgatgctccttgtcttatgatggatttacctttcgatattttctgtttacgatgggtttatccagatgtagtcctgtcataaagagcatattgaatgcgtgtatcaccatcctaaagtcaaaaaattgcaagttgaacaatcaaaagttggggactttctgtactacaccattttatgtaagggacttgaacatccacagatttttgtatcctcaggagtcttaggaccaatcccctgtggataccaagggacaactgtatatcctttgaaattttaacttaatagattttctactaaagtgagagatgttgtgggcatttggcagatttagaaaagataggaaagcaactgagtatttatgtcttcctatagtcatcttgtgtttttcaaattagaaaggtaaaaactattaaaaatttctttgtctatagtggaatagagaaaagggcatttgcttttccataagttcatgcctcagaatattctaaacaaattttgaaatagccacattgggagatctttaggacactgctccccagattatgaagctgcttcagccactgccttccaaagcttataagctactggaggaaatggaaaggtacataaacatcatcagttcagttagagtgtgttaggcagatgaagagctacaacaaataaggagctctgcatttataagagaggagacattagttgtcactaagggcatcaagaaggtgctatttttactgatcattttgctgttttgattataccccaatttacattgtgaaatatgctcttcccaattggctatagttagatgggactgtcagacatgggaccatgctccctgctatccacactgagactgtaagtctctcctggaactctgaaaccctcagacttaaagagaatggttgacacaaattcattttagtggcctggccagatgtttgatggcctgatacatagcctcgtgaatctgctcctgttcctgtcctttatggaccaggtcttaggtctgtcccttaattctgcagagtacctaatgcatttccaaaaaaatcattctctgcttaggttacagttttagggtctaaccctacatggtgtagagtgtaacaatacaattacattaattttgcaaaattgcatactttattatacaaaatggaatttttgtaaaacagctccacaaattgtcattatctacaagttaggcttttttttttaggataaacatacattggctgcaacaaactcatagttaagatctcacagtgtgattagggagacaagattcaaaatatacaactttaaagagcatttttcttttaatgtcctattatttgctttctgtactttatcatacctgtaaattcttgtctctgtaaaactcaataatctggtggtttcactgtaattctttcagtattaatatattgtggtctgcttgtagaaatatgatttttaaaaaaagttgggcatgagggctcatgcctgtaatcccagtgctttgggaggccgaggcaggaggattgtttgaggccaggagttggagaccagcctgggcaacagtgagcccccatctctacaaaaaatcaaaaattagccaggtgtggtggcatgtgcctgtagtaccagctacttggcaggctgaggtggaggatctcttgagcccaggaggttgagactgcagtaagcagtgattgtgccactgcattccagcctgggtgacagagtgagaccctgtatcaaagaaaaagaagataaaatattaatcatcaaatgaaacagtgcctagaatagtacctggcacaaagtagttaaattaatgaacaagcgaatgagtaaataagagtgatgagcggatagtacgtacaatatactctgtgcatgggctactgagctccacaggagaacatgagcaaaaccacacagatgatcaagtttatacattcgttgtcatcaatctcaattaaacccttaacactgactggctgtcttactgtttccctagttagctgtctcccattttcaacagctattccaaaacttctccactcctcttaaacctccaatccacccggcaccccctctcattcttggtagattgactcctcccttctttacagaacaaagagaggtgaccagacaggaattgtctcccttcttctgaccaccaaatatacaattctccctgttccctgcactaatagtcctcttcctcttcccattccagtagaagaggcattcctcacatttctggatcccattcttttctgacacttttgtgacttttacttattcgtcttcctgatatcttatgttagaaagtaagcattttcaagtctatttcatctcaatatctcttgacccacatccctgttcagttaccatacaccctctcttgtctccatttcagtaactccttgaaaaaatttacctgccttcccaaacccatcttgataacatttccaggaacttccgtgttgctaaatctaatgcatacttttcaatcctcattttaatatacctatctccatcctttgttttcttattttcttttttgtcactcttctgttttacatgctacatctctagcactgcattattactctttttgcaggactcttttctatgctcctcttagttataagtgttccccagagctttatcctaagccatttttctccacacattttactaggtaatttggtttattccctaggctttaattaacatcagtttgctgataactatcaactatagatgtttagcccatattgctctcctgaatttgagacacatgtacctaccacatgtctacacttaatgtctaacaggtacttcatactcaaaattcatcctctcttacaaacttactcttcttccagtgttttctattcatgaaatggcatcaccatccaaacactcgctcaaaccagagacatgtgtcactcttggcttctctctggcttcttaaccacagctggtcaattaccaagtcctatcaaatctaccttcctaaatacatcttgaattcgttcacttctatccattgcccccatgctcattggtccaccattatctcttgccagagctagtgtatctgcctgcagttaactggtctccctgattttctcttgtcaaaccccccataccccacaatgcattcccattccttgccccgagtcacaattgtcttccaaacatagaaatcacgttctttgaatgctgaaaactcttcagttgatttacattgcctttttgataagatccaaacttctaatatgacctataaagtctttcataatctggctcctgcctttatctccagcctcatttcttcttttttttttttttttttttttttgagatggaatcttgctttgtcccccaggctggagtgcaatggcacgatcacgatctcggctcactgcaacctctgcctcttgggttcaagcaattctcctgtctcagtctcctgagtagctgggattacaggcacccaccaccacgcccagctaatttttatatttttagtagagatggggttttttaccatgttgatgaggtccagcctcatttctctagtattctcccctcccctactatgttcttttagttccctcacttctgtgacattgaactcaaagcttctgccatctggaccttcctccatcatctaccaagttaactcatgcattcttctggtttcagcttaaacttcctttgctccaggaggttaggagtccgtgctctgtgcacatagtgctccatgctgccttatcataggtgcattagattttgctgtaattactaggttaattttctattttttgtggactataacaactgcgtttttcttgttttcctctgtattccagatctgtcactgtgtctggtacatggtaagtttctattaaatgttgaagggtgaaagggagcgagagagaaaggattataatatggaatagagtacaaaatttgcacacattttgcttttctgtcacatcagtatggtttgcattaacctcacaagttacatgtcagctttttttttttctttaatggaaagacatatttaggacatgttgtctgcagaccccactgaatggacagaacaagatacttagaccagtggttctcagccgaggctgctcactggaattacttgagaattttttaaaattctgattcctgagtcccaactttatagattctggtttaactggcgtggcatctgttaaagctctccacgtgattctgatgtacagcaaaaattaagaacatgacagttttactacagccatttctctatgacttgcttcaatgactgatattcaagccggtcgaagaacaagaaaatcaaacagtccagattcagcagaaccctgatccacccacgtgctttcaattacaactaaaaatagctggaacaattaaaaaagagtttgttggtacaaataactgtcaagtccagaggtagtattggttcaggcaaacatgatccagtggcctagagatggccccaatgccccagtatctctctgcttcgctttcctgtcttcgttttctttctcctaatttagactcttcttgtggccataggtggctactaaaggcaccaggaaaatgagcccgtctttgtcattaacatcataagaaaagtctttcagattcactttgattggactggtttaggttaccaaccaattgctgcatttaagaggttggaatatagtaggagtagagtcctcttcccaggaaacacagcaatccccaaatgaaagtgggatcttttagaaaggaagaagggagataaatcaatgctgagactatcaatgtctgctttacccatacagtggttttggctggctgcagaatttggtcacaaaactgtagcactactttatagtacatagtacagtactataaagtacatactttataagtaacccagatttctacatcaattcccacagttaatgactactaaaaaactaagcatgattagattaatcataacactgtttagtgagaagaacttgagaacggaaaattgatttggatcctgcaaacttaagttgccccacgtatggcttttgtttagtgcctcagtaaacaatgttttcttgcttcattttgaaaaatgaaaaatcttagattctccagagagagtttgatttgtagattcccaccctgccccctgcccccagctgagtcaccagccaggaacattttgttaaggtttattttttacaatttttgttatgaacgcaagagttttaaatttcccccccaaatattgttgaattataacattggatatgccttttctaattatatatgctaaaagaaaaataccacacacacacacacacacacacacacacacacactcccctaaaatccccttccaggctgggtgcggtggctcacacctgtaattccagcattttgggaggctgaggtgggcagatcacgaggtcaggggttcgagacgagcctgaccaacatggtgaaaccccatctctactaaaaacacaaaaattagccaggtgtgctggtgtggcatgcgcctgtagtcccagctactcaggaggctgaggcaggagaatctcttttttttttttttttttttttttttttgagacggagtctcgctctgtcgcccaggcgggactgcggactgcagtggcgcaatctcggctcactgcaagctccgcttcccgggttcacgccattctcctgcctcagcctcccgagtagctgggactacaggcgcccgccaccgcgcccggctaattttttgtatttttagtagagacggggtttcaccttgttagccaggatggtctcgatctcctgacctcatgatccacccgccttggcctcccaaagtgctgggattacaggcgtgagccaccgcgcccggcccaggagaatctcttaaacctggaaggcagaggttgcagtgagccaagatcgcgccactgcactccagcctgggcgacagagcaagactctgtttcaaaaaaaaaaaaagtccccttccttctgcctatcccccagagaagggcaaccctccctagttgaaaactcactgttgtagaactggctgtcaccaactacccttctggttataatttggcttcttaagtttcccatagacagaaaatgtgctaaccagcaaacttggatttgaggcttgctacgttatgtttcccattgcaagttaattaattggcattcatcagcccttagagtcccattgtgtctgtgtgtgctaacatttaagtttctgagttaataaagctgagtaccacattccagaacaaagccccttccataaatctcactagaaccagaggtgctatcccgtcctggtgaccaaccagttattctccaagccaccctcaccagactccttttcctccaattgtactagtaaaatcatttttaaaaaagaaaaaagaggcataaaatagcataggcagaatttaatttaccatctagaaatgcaagatggcacacatctgtagaaacattgaaaggagaacaagacctttaggttgccgtaatcccagggctgattatgagaagttcccttgaagcgagtgcttgtgaggaagaactcagtagctagaatgtgaactttgagtaaatattggccctaaaaatctcagttatcacatgtggaggaaggaaagaagcttgttacaagagtagagactaaattcacccacagggctgcaagttcctttattccagaaaaccacaaagaggaatcttttagtgatgcaaacatcaaggataaagcctttttatttttttagacagggtcatgctgtgttgcccaggctagagtacagtggtgtgatcatatctcactgtagcctcaaactcatggctcaagtgatcctcccaccacagcctcccgagaagctaggactacaggcatgtgccaccatgcctggctaattttttaactttttgtagagatgagggcttgctatgctgcccaggctgctgtcgaactcctggtctcaagtgatccccccacctgggccttccaaagcactgggattacaggcatgagctactgtgcccagccaaagagtaaagcctttgcagagatgttgttttgtttttaactgtagaatatctcaaacttatacaaaaatacatagaataatataatgaactctcaggtacacgtcacttagtttcaatgataatcaactagtgtcaaatattgttgcctcaaaatccccacccactttgctctgtgccccacttctatgtaattatgagtcaaatctcaggcatcatttctgagatggagctggtttagttgaagagcaatcttattctgactggtaatatgaaaatggtcactgtggtaaaagacttgcattttttcagattacagttcccttgtggttaggctgcactatcccagtacaatttcacttgttcttaggtgcatgtgatatctgctgttaattaagggattgtttataggagaataagagcaagtctgaagaccccaggaaaggtgtgcaggccagattatcaccttaaactttagagagctggcctggatttggctggatatgacccatactgggccatgggaggcccttacaaccacagaataaggagacctttattctaaaactgaagaacccagaagtgcatgccatggcatgcaaataccgttacatcagagtaatccttttgctactcaagaggctgaagcaggagcaatgcttgaacccaagagttcaagattgttgtgatctatgatcaggcctgagaaaagccactgcactctagcctgggcaacatagaaagactcctgtctcaaaaaaatttattttaatacaaaaaacctgaagaaccctggccgggcacagttgcttacgcctctaatcccagcactttgggaggctgaggcaggaggatcacctgaggtcaggagttcgagaccagcctgaccaacatggaaaaaccccatctctactaaaaatacaatgttagctgggcttggtggcacatacctataattccagctactcgggaggctgagacaggagaatcgcttgaacctgagaggcggaggttgcagtgagctgagatcacaccattgcactccagcctgggcaaccagagtgaaactccatctcaaaaaaaaaaaaaaaagaaaaacaggctcaggtgccacctgtaagaggaaggagaactggaccctgccatgggagttaggcagagagggttcaggatcaggcctgaaccttctgatatgctgagaagccagtcctgaggttgcaggaggttatttgcttggaggctcgcccctgggagctaaccatcatgatcctgtgggaaagttaaatgttctcaaggagtcctaaagttacttgtgagggaaacctagtaaaagtctagacttcctgttgcaccataggtaggatgaaagtaaaagaaatctactgtcatgataatttccaagcccctttgagtcctgagctaataaataaatgtaataaatacatattaacattatatatatacttttgatgtgggtagccagtttctagaaggatacataagaaattcttaatagggtttcctctgagatggggccagggagggtggccaagatttttactttttactttgtactcttctatacattaaaaaaagtttatttattatttatataatacaaataaataagatacaaatgtgtgtacatataatgtgtcagcatatcccaactgagccgaaaagtttatgccacattaggaattaaatggtagagaaaaatagcattttaaaaatattaccccacagtggtttacgtgtaaagttccttcaaaattttccttctgaaattttcctgtttttttttaaagactaaatatatctttcttgctgagctataagctataaaacaattttagtattctcccaggcctccaccattactaacaatattaattccttgcatatagcattagaccagggttctcatccctggcttgcacacccagagcctggcctgcacacctagagcctggacccaaagtaagtaaacctgaattgggctcacctgagcctgtcttttttctcaactttaaaagcttcacaggtgactgtgatgtagagccagagctgaggttcagcattagaagaactggggagaatgttgcagggaacagtgctagagtactcaaccaaccttctatgctagttgatgggtccatcccagagattttccgtgaatgagcaagtagcagagcaaaacctaaattgaaccctgtcaaggaatcacgaacacctttgtagtttaaaatatacttgttaaaggatgttttaaattaattgttcacttcattccaatttgtcttttgactcccttagtacttttcttccttgcatttcatgtaaatccaatgctgtgtgagtaaagagaagagaggagaaagaagaaaatgtgctgaagcaggtatttttagagtgggttttcagaatattttggagttagcattaattcatttcaaaggagcagaaaaatattcagaggtagcatgaggttagtatgaaaaatgttggcaggacctctgattctgttgctgactctccaggatttggaacaggcatgtttccttcatgtggaattggaattaattggacaattaattcaaaatgccttcatgaaaagaacaaaaacaaataaaattgcccttcatgtctgattgcctcaacagaacaacaaaaaagtgatggaactggatgctctcccagtcttacatttctatgtaaatgtgaaagagaaacatggctacaaggaccaggtatggcctaggaaatgggagaatctaccttttagaaggggttcttaacatagggtctttggaaggtttcaaggtgtcaatgaaccttctgaaatcacatataaaatggtgtgtgcacctttttttctagggttatggtccatggctttcatcagattctcaaaccattggaaaggattaaaaactgcctttttttttttttaaggagtctggggggtagggtggacggtataaaaattattcaagttaggaatattaaaaagagagcctgttaatttagtcaaatattaggggggatcacattgattcttggagctggagagaaggcagaaaatcacatcatttgaagccacgaattgtcaggaaagagatgggcaagaaattacaggctgaaattcaggtgaaggagcaggtagttggtaattgttgaagctgtgtgatgagtgcacagggattcattatatcattctctttacttttgtttaggtttgaaatttttcactataaaaagtttttgaaaataaggagccccagagagaattcctagaagatggcagaggaggaaaaagaggaacctatcttcccacctagataataattttaccagtagaatctgtctaatgtaagtattttggaactgtggagtctgttgaaggcttataacttccagggcttgagcaataattgtggttaattttcatcaatttcagctgtaatcacagtagcagctaaccacccttcagccacatgtcaggcagctgtgcacatgctcctggagcaacctgtacacagcctgtgggagctagggtagctgaaaaggaccctggcctccaaatatttaggatctatgctctcattgctgattgctgcttctcatcacaaaggtgcaaagaagcagcaggttttgttgttgcactttaccccattgttgcgagtccctccatctctggatgaaatgactctcagggaatataaagggcaaacacctttttcccttcctacattttcccccttttaggaactagatattgaagactagagcattaaaaatgaaccacatgtatgtgattggagttggaaaatcatcatgtatacccagggaaaggcaaaggctcaaaaaatatatgaaaggatcttaactttatacttctggctgatccacaccacaaagacagcctacaacaacaacaacaaaaacagaaaaccagcaaaccagctgggtgaggtggctcacacctgtaatccctgcactttgggaggctgaggcaggcagatcacctgaggtcgggagtttaagaccagcctgaccaacacggagaaaccccgtctctactaaaaatacaaaattattcaggtgtggtggcacatgcctgtaatcccagctacctgggaggctgaggcaggagaatcacttgaacctgggaggcagaggttgtggtgagccgagatcgtgccattgaactccagcctgggcaacaggagcaaaactctgtctcaaaaaaaaaaaaaaaaaaaagaaaagaaaagaaaaccagcaaaccaaaagaaaggacactgattttcagagttaccacattattagattcaaatatccaatttccaacaaaaaattcacaaggcatgcaaagaaacggaaatgtatggcttggttaaagggggaaaaaaaataacaagaaattgtccctaaaagagacctaaaaatggttgtaatagacaaggactttcaaacaactgtcttaaagatgctaaaagaactaaaggaggatgtggtgaaagtcaataaaacaatatgtgaagaaaatgtaaatatcaataaagaaatagaaaacctaaaaagaaagcaaaaataaattctggagctgaagattacagtagtcgaagtgaaaattttaagaaattcaaaggcaaatttgagcaagcagaagaatcagcaaacttgataggacaatgaaaattatcaagtctgaggaacagaaaaaagactggaggaacgtgaacagagcctaagggacctgtagggtaccatcaagcagatcaacatatgccttgagggaattccagaaggtgaacagagagagaaaggggaagagagaatatttgaagaaatgatgatcaaaaactccctaagtatttggaaaattcacaaatttctggaaattaaccaacacactcttaaataacaaattaataaaagaaatcataatggaaattacaatgtacctagagacaaatgaaaatgaacacacatgatacccaaacttatggaacacagagaaagtaatgcaaaggggaatatttataataaattcaaaatttacattaaatagcttacattaaaaaaacaataaatgtcttaaatcaacaacctaaacttaaaacttaagaaactagaaaaagtaaaagaaactaaacccaaagctagtaggaggaataaaataataaagattagagcagagataaatgaaatagagaatagaagaagaatagaggaaaataatagaagaataatagagaaatctgaagatggttcttccaaaagatcaacaaaattgacaagcctttagctaaatggactaaagaaaaagaagactcaaattattaaaatcagaaattaaagtggggacattattaccaaatctacagaaataaaaaggattttaagagagcaattgtacttcaacaaattggataacctagatgaaatagacaaatttctaaaaacacacaacctatcaagactaagccacaaagaaatagaaaatctgaataaacctgtagctaacaagaaagttgaatctcttataaaagacagtgatttaaaatatcccatgaaataaaatccctgcacagtggcatgcaactgtagtctcacctactcaggaagctgcagtgacaggatcgtttgagcccaggagttcaagaccagcctgggcaacataagaaaccccatctcttaaaagaaaagaaaagccctggatctgatggttttaccagtgaattataccaaacatttaaagaactaacaccaatccttctcaaacttttccaaaaaaattgaagagattacaccctaacccagtctattaggccagcattaccctgataccaaagccagacaaagactctacaagaaaagaaaactaatagaccaatatcccttatgaacattgatgcaaaaatattctgaacaaaatatgagtaaactaagtgcaacagcatatttaaaagattatacgctatggctaagtgaggtttattcctggaatgcaaggatgattcaatctatgaaaactgatcaatgtaatacaccacattaacagaatgaagggagaaagccacatgatcatcccaagtggtgcagaaaaagcatttgacaaaattcaacatcctttcatggtaaaaatgctcagtaaactctgaatagaaggaaactaactcaacataacaaaagctgtctgtgaataacccacagcaaacatcatacttaatggtgaaagactgaaagctttttctctaagatcagaaacaagaaaaaaatttccactttcaccgtatagcattggaaatgctagacatagcaatgagacaagaaaaagaaatgaaaggcatctaaaatggaaaaaaagaagtaaaatatccctgtttgcagatgacatgatctcatatgtagaaaaccctgaagattccacacacaaaaaagttacaattaataaattcagcaaaatagcaggatacaaagtcaacacacaaaaatcagtcgcatttatatacacaaacaataaacaatctgaaaaaacttaagaaaacaattccatttataatagcatcaaaaataataaagtacctaggaattaactttaccaaggatgtaaaaaatctatgtactgtaaagtacaaaatatatctgagagaaattaaagaagacataaataaatggagagctatttcatgttcacggattggaagacttaatattgttaagatttcaacactacccaaagtgatctacagatttagtgtggttcctatcaaacaagtaggttttttttttgcaaaaataggaaaacaaatcttaatattcatatgaaatttcaaggaactctaaatagtcaaaataatcctaaaagagaagaacaaagctggaggactcacacttactgatttaaaaatttataataggtaatagtaattaagacagtgtggtagtggcataaagaccacacataaagaccaatgaatacaatagagaatccagaaataaatcttcaaatatatggtcaaatgatttttggtaagggaaccatgattattcaataagaaaaggacagtcttttcaacaaatggtgctgagaaaactagatatttacatgcaaaataatgaacttttacctttacctaataccatacgcataatttagctcaaagtagatccatggcctaaatgtaagccctaaaactataaaactcttagaagaaaacataaggcaaaaacttcacgacatgggattaggcagtgattttgtgtgatgacaccaaaggcacaggcaacaaaagaaaaaaacagacaaattggacttcatgaaaatttaaaaattttatatcaaaagacactatcaacagaatagaaagacagcctacagaatttgagaatatatttacacgtcatatatctgataagggattagtatccagaatatatggagaactcctaaaactcaacaacaaaaatacaaacagctcaattcaaaaatgggtgaaggacttgaatagatatttgatacttctccaagaagatatacaaatggccaatcagcacatgcaaagatgctcagccttactaatcattatggaaatgcaagtcaaaactatagtgagagccacctggacacccttaggatggctactatcaaagcaatagaaaataaaatgtgtttgcagggtatgtggagaaaatagaatctttgtgcctgtttgggggatatagaatggtataaccactgtggaaagcagtatggtggtttctcaaaaaattaaaaatagatttaccatatgatccagcagtgccatactcagaagaattaaaagcaaagtatcaaagatatttgtatgctcgtgttcatacagcattacttacaatagctaaaacattgaagcaacccaagaggccattgacagatgaatgaaaaagcaaaatgtgatatatacttacaatagaatattgttcagccttaaggctgggcacagtggccacgcctgtaatcccagcactttgggaagccgaggcaggtggatcacctgaggtcaggagttcaagatcagcctgaccaacgtggtgaaaccctgtctctactaaaaataaaaaaattagctgggcttggtggctgacgcctgtagtcccagctactcaggaggctgaggcccaagaatcacttgaactcgggaggcagaggttgcagtgagccccaagatgatgccactgcaccccagcctgggcaacagagtgagactcggtctcaaaaaagaaaaaaaaaaaaagaaaaagaatattattcagccttaaaaaggaagaaaattcaggccaggcatggtgcctcacatctgtaatcccagccctatgggaggccaagtcaggcagatcacttgaggtcaggagttcaagaccagcctggccaacatagtgaaatcccatctctaccaaaaatacaaaaattagccaggcgtggtgacaagcaccagtaatcccagctcctcaggaggctgaggcaggagaaccgcttgaacctgggaggcagacgttgcactgaaccgagatcataccactgcactccagcctgggcaacagaatgagaccctgccacaagaaaaaaaaaatgaagaagaagaagaaagaaaattctgaggcatgctacaacatggatgaaccttgaggacattaggctaagtgaaataagccagtcacaaaacaacaaatactatatgatcccacttttatgaagtacttaaagtagtcaaaatcatagagacagaaagtagaatgatggttgccaggggtagcaggaagggagcaatgagttgttgtttaacgggcatagagtttcaattttgcaagatgaaaagagatctggagatggatgctggtgatgtttgcacaaccatatgaatatactgaatgccactcagctgtgcacttaaaaatgattaagatagtaaattttgttacatatattttaccataataaactttgggtaaaaaattaaaatgaaaagaaccaaagtgagatagcagaggaccctgtgagctgttgagcctgtgtgaacagagactagtggccctcatggcatgtggctgaatgagtggttggtaacgatctcctgctttctactatctgtttccttttcttcctcagtttttttcttaatctgcttccttgagaaaacaatcctgcttctttgagatacaaaattccaagtttgatgtggtgattatggggaaaaaaagaacgtaaggtcacaatgagaagatgggacactatggaaggccctttaattttctaatagtcacatagactttaaaaaatagtctctggggtctggtaacttggtaatgtcattgagttattataaaagagtaagcaattttataatatatttgtttagggatataattttgtataatttcccttgttcacttatttttcagtataaatcagccttgatgatatgatcatttctatttttttctaaaattagaataataataatacctgttttattaatggtgatataaaatctaggagaaaaacatgaatgaatactcacaagtatttactacttgtgagtagtagaaaacatgtgaatactaacaagctaccatagtcttgttcctgaatttccataagagagaccttccaaatgtatgaatttttatgtctatatcttaagccaagaatatccttcttcactatacccaccctacacctaatcaggaaattttcaaagtctttcaacatatttcatattcacaaattgcttatgttggatcatcacccttgtccttcacttcttgggcaccagagggcatacatcttaaatctcactttctcagagacacaaatcctttttccctccactgcaggattttctcctctggatttgctctggcacctcgaagaagcttaggggaacagttcagctttgctcttcctgataattagtggctttcctgatggtgtggttcaacacacccaccagagacggaaggtaatgattactcaggagacctgcttcctttatcaatctgcacaatcaaaagaattgtccttgaaaatagtctttgtagaccattagttcataatcttttttgtttgtttgtttgttttgctaacttttcattgtttttaggctgaagatagcctaaaattgtattcattactttagccttcgaagcttataaagtgagataatagaagtgaaactgctttcgaacgggaaagaagcaccatataattgcaaagtagaattacctttaggagaaatgttaaccagacaaggccagtctgtcacccactggggagtcgcacaatctcagctcgctgcagcctcaacctccccagctcaagcaatcctcccacgtcagcccccagatagctgggactacaggcatgtgccacctaagttttttattttttatagagacagggttcaccctatgttgcccagtctggtctcgaactctgggctcaagtaacccgcccacctcagcttcccaaagtgcaaggattagaggtatgagctgctatgcttggcccataatttttgattcttgtgactgtatgcccacattttttttcttatgatttctctgtagatctgtccttataaaaatttttattttctaaacttgttaattcttctggacatatcctaaactacacatttagagccacccaagtagccatccatccacttatgaaataatatgagtattaagaaatctagaaattaaatttaaaaaataaaatatgactttttgtttgtttactattaaaaaacaggtctcaacaatcaataagtaaatgattctaagagaaaatgttaaaatataatttttttttccctaataccagataagaatatttttattttcctttgggccatccctcaatcacagtatattcagagtagttttcaaattttgtaggattgtttttatctttctgtggctttgacaagtatcaagtatgggtagatttagttgaaaaggtaagtaggccacagagcatcagaacaatttctttattttattttattatttttttttgagatggagtctccctttgtcacccaggctgtagtgcagtggtgtgatctcggctcactgcaccctctgccttccaggttccagcaattctcctgcccagccttctgagtagctgggattacagctgtgtgccaccatgcctggctaatttttgaatttttagtagagacagggttttaccatgttggccaggctggtcacaaactcctgccctcaagtgatccacccatctcggcctcccaaagtgctgggattacaggcatgagccaccacgccaggcgcagaacaatttctgaattcaaaacaaatagccctgaatagtaaattctctcttcactgaatagagaattcatgttcaatgttttgtcaatgttttcattgtaggcaaacctgagaccaattttcttaggaagacaatgccataaatgttgatgaggctccctagttaacccccaccccaaaccaaaccaaacaagactttttatccagttaaatatgttgtagtcccctctgagatccccatcactctttgctattcatatttttactatttttgtgattagcataagtattagaaagagaaattaatatctgcagagcactttatccacatgtactaagttgtacttatatcccaactctatgtgaggtatatgtatgaagtactgttgttctgggatctttgggattgggatgtcgcttttctggccggaaatctctttggctggtggtgcctttgcccaagttttctcaggccctctgggcttgttccgcccactcggcctggcaggctgtgctcagctcatgctactggcccttgatcacacctctaagggagactgagtcaggtgtggagcggcaagggatgtgtaagcaagcgtgggatccggccactgcgcacaaatacgccggctgctgccagggggcaggcagttccgagtgctggcacgggtgccagcgctctgtgaggctatgctggaccaggcacactgcaagcaacttccccagctggcaccggaaaatgcagtgacgcccagaagcttgacacccagaagcttggagatgcctgcaactgcaggcccccaaagagggagtcacagccctggcttggggagctcccaggtctgggctccctgaagggccgcaggtgttctctcctcttcacccacaacatggtggacaaggggcatgtttcagccctgtttgtgtcacagctcttttagccttgccatttggtgggtcccgagttcttgttcttccacacagacaagtagagggtgagcaaggcgaagaggagctttattgagaaacagaatagctcagaggagacctgcagtgggcagcttctttccatagccagggtgtcccgacgagttttcagctgtcagcagagagggtagctcctctctgcagctagtcctcccaccatctcctcggctcctctctgcagctggtcatcaccttgtctccctgtcctctctccatcctctcttccgagtctgactgactctgggggtttttaatgggcctcagagggtaggaagtgtgtgctgattggtccatgggtggccgtggatgggcccagggaaaagcaccacacgttcccactctggtccgtgggactggcagcccagcccccaggcttcaggccccccttggcttgaaggtaggagtttcctggggacccaccccattctgcccaggagcctatctgcttcctgctgctgttcatggtgcccaggctgttcttgccaaggggcacctgcaggccagcgccaggctgtcctcagcaccccctggtctccctcccatgttcattagttcccaaagtccagagagggcagagatgacaggggccgggtgtctcagcggtgccctgagcctgcgcacacccagccaggctgcaacagcgcccgggcttggccccatccttgctctgagatccgagggggcgctgggagcggggagaggctagacactgggagcagacccctctgagcctaccggggcaagggtggccttcctgggcccctgagagttcagagatgcctggttctgcagtcgcagctcggcgtctgcagctgggtccaggagggcggggctcctgcctgctcccagcccctaagcacagggaggcaggggtccatgtccacagcggtgtcttgggtggctgcagccgcacccgaaaggtccaggctgctgcctgctcccggctcccgctggcttcatgaaggtgacaccgccccaggcccagctccgccttgggttccctctctgcccaccccttcacgtccgaccgcactgctcttctgccagcaggcaactcggcctggccccatcacggcggctgccagagcggtgggatctggggggctcccagggcaggctccagagactatcatctcctccccgcagcctccccgcagtggtggccagcaaaagcagcgacgtggggccagggtccagagcagcagaggctctgggcctgggatcaagtcccacccaactgcacgagggttgggcaacaaagtcgaagtccgctgcctcagggatgcgtgccacaggggtcacaccgctgccactgtcactcccacagccgctccctccattactgcccatgcccctctgctgctgctatcactgtgatccttataactggctcagataagttaaataaacagatttaaaaattcaagacgtaggacgggcgctgtggctcatgcctgtaattccagcactttgggaggtggaggcgggtggagcacctgaggtcaggagttcgagaccagcctggccaacatggcgaaactctgtctctactaaaaatacaaaaattagtcgggcgtggtggcgggtacctgtaatcccagctacttgggaggctgaggcaggagaatcgcttgaacccaggaggcagaggttgcagtgagctgagattgtgccactgcactccagcctgggcaacagagcgagacgccgtctcaaaaaaataaaaacaaaaaaaataaataaattaataaaataaaataaaaattcaagatgtacattattatggaagagaattcatggttttatttttttcagaattggcatagacaatcctgaatttctaacggtttatgtgtgaaaatgtttttttaaagtcaaatattttaacttaattatatttttaaatgaatactgagtgcatggaaaaatatattctggacttcagttcctcaaaccccaccttcacctgcaaatcataagttttagacccttttcttttctgagtattaccttttctctccacctacattccctgctaaccaggatagtcactctcatacgcagcagatgtgaagccaaatgtttgggagacagtgtgggtggagagaaaaagtgtagccttgagcatcagacacatcttaccttacttaatttacagcatgcccttgagcaaatgttgtaactgactgagtctcagtttccacttttgcgaatgtcataataataatatctatatcttgcagttattttgaggattaaatgagatatcatttatattgtcctgaagtgtaattggtttcaaaatactttccacccttgctagtagtaaaatgagtaatatttagcaataaattactttgcacttcagttgtggtttagagtagtgtgaaagcttagattgttactattccataggaattagctcctggttttggcctgagactgactaatgtctaatcctcaaaattcctattcataaggttcaataataagcagatgggttacacaaccctaattttgcaggtcgcacttacttttcctcttgatataagtttttgtcagcaactaaaaacatccagtttagtgaaaaagtgtgatcaatatataacaacacaggaattgtctaagaagaattcaggaacaagagaatgttgggtaaatcgtaggctgatcatgagagagccacagctatagaaaaaatctgatttagagaaatgataattttttgtgttttctcttaccccttccctccctttagttcccaataattttattttatagcaaagatacttaaaataaaattttattttatagcaaggatagggtcttgctttgttgcccaggctggagtacagtggctattcacaggtgtggtcatagtgtactacagcctcgaactcctggcctcaatcctcccacctcagcctcaaaagtaggttggactacagatacacattaccaattttaaattttaaaatgtaaaattaaaattttgcctttcttcacttttctttctttccattacttaaacttcatttgacatttatacaatcaagaaatacaaactgagtccttactacatgtcagaaacttgtagaatacaataataagtgaaacagccagtctttgatttcaagaagttaacattggttgggaaggcagataactagaggtaagtaacaataaataaaaaagatgatttcagagaatgctaaatattaaggaaaataaagtaaatatgacagagagtaaccaaggagcatctttagattgggtggtcagagaaggctttctaaagagagcttgagctaagacctggctgataggtctgagccatttgaaaatgtggcaggaaaatgtgatgcacagaagccaagagaagaaaatgttttaagaaagagagactgggcaattgaatctgctgataaaataggtgagatgaaaaccagaagtgattattaaagttggcctttggtgacctgggcaaaagcagggacagtggtgtgatctgggtgcaagttcagctgctgaggctaagagaagaattctgccaaatggagaaactagtgatcaggttgtatatgcccagaagctggctagattgttctttataaaataaagtaagctctagtacccctagtacctcacaaaacaaatgcatctacttggtttgtatcacttctgacaagttgtgttaataataatagtagaattatttattattttactactgatttcatatacttttgactattatatcaagatcctgaattttccttttttaattcaacttaataattttttaaacttttacttttgtagagacaagatctcgctgtggtgagcaggctggtcctgaacttctgggctcaagccaccttggcctcccaacctgctgggattacaggcacaagcaaccacatccagcctcccttttttttttttttttttagcaagtgtgtgaaaccctacgcttctgtctcctcttcaccccttcccatcttctttcctaactgtgcccgtaaatgaatatataatcaatttgggtggagtttatcactgaaagcttcctaaactggggagtaaatcagtttggcacagtggttatgagagcagattttggctgtgacctggctttatatgctggctctactctttactacatatgtgaacttggacaagttacttaacttctttatgcttcaatttcttcctttgttaaaaggggataacgtgccaggtgcagtggctcatgcctgtaatcccagcacgttgggaggctgaggtgggtggatcacttgaggtcaggagttccagaccagcctgaccaacaggtgaaaccccgtctctactaaaatttcaaaaattagccaggcctggtggcgtgcacctataatcctagctactcaggaggctgaggcaggagaatcacttgaacctgggaggcggaggttgtagtgtgccaagatcacgccactgcattctagcctgggcgacagagcgagactcaatctcaaaaaaaaaaaaaaaggggggggggggaggcggggataatgataatgttttataagtgttttgtaggtatcaatttatctaatttcacaataatcctataagtagtataattaaacttattttacacatgagaaaaccaaagaacagatgttatctgccttagatcacaaaactggtaaatagcaaaccagaatttgatcctaggcagtgtgattcacaacctagagcccttaactgcaatgatgtctccctgcctgtcctaaagggtcatgctctgtactgtgtggcctgaaagcccttctccaagtcttgttggacctgggtgaacacctgacccaaaacgatacaatgcttatatagcccagctagaaagatgacctgaactggtcagattttttcactctgaggaatttgttctgaaaacatgggaataaactgccacatgatggtgtgaactacaactgagaggtccagtacagttggggccttgatggccactgggagtcttatgtgaggagaatcagcagagggaagaagagaaaaaaaatagggcagatgcaccatgacaaaactaattagaagggtttgtgacctctgagggagcagccagcctcattccgttcctaaactttctcaggtctggtctcctgaaggcccaactgtccttagttcttttcttttcttttcttttttgagatagagtttcgctcttgttgcccaggctggagtgcaatggcatgatctcagctcactgcaacctccgcctgccaggttcaagcagttctcccacctcagcctctcgagtagctgggatcacaggcatgttccaccacacccggctaattttgtatttttagtagagacaggatttcaccaagttgatcaggctggtctcaaactcctaactttaggtgatccacccacctcagcctcccaaaatgctgggattacggtcgtgagccaccgctcctggccgagtccttagttctttgagtgagtccactgtgtatccttccaaaaaaacaacaaacaaaaaatgcagctgttataatcatagcaaagaaaaattctttacttaacctagcatggatggttctctgttccttgtaaaataataacagcaaccacaaaacaaccttatttaaaaatgggcaaataatttgaacatacatttctctaaagaagacatacaaatagccaacaaagtatataaaaagatacccaaaattactaatcaacagggagatattaatacaaatcaaaaccacaatgagttaacacgtcacaccaattaggatggttattgtttaaaaaaaaaaaaaaggccagacatgatggcccacacctgtaatcccagcactttgggaagtcgaggcaggcagactgcttgagcccaggaatttgaggccagcctgggcaacatggcaaagccccctctctacaaaaaatacaaaaattatccaggcatggtggcacgtgcccatagtcccagtactcaggaggctggggtgggaggatcgcttgagcccgggaggcagaggttgcagtgggtggcagagcgagaccgtgtctcaagaaaaataaaatataaatataaatataaataaaaccaaataaaaagataagtattggtgaggttgtgaagaaactggaacactagtatgatgttggtgagaatgtaaaatggtactacagctatggaaaacagtatggagattcttcaacaaattaaaaatagaactacagtataatacagaaatccttcttctgggtatatttccaaaagaattgaaatcaggatctcataaagatatctgcaccttcatgttcactgaagcactattcacaatagtcaagatatgaaatcaacctaagtgtccatcaacagacaaatggataaacaaaatatagcatatgctagaatattattctgccttaaaaaggaaaaaagttctgacacacactataatatggatgaaccttgaggacatattaagtgaagtaagtcagtcacaaaaagacaaatactgtatgttccacttatatgagatacctagagtggtcaaattcatagaaagagaaagtagaatggtggctaccagaagcagggcagcagtgggggttgaggggagatggggagttgtttaatgggcatagagtttcagttttgcaagatgaaaagagatctgaagattggttgtacaacgtgaatgtacttagtactactgaactgtacacttcaaaatggttaagataataaatgttatattaggtatattttaccacaattaaaaaaccagcaagcaaacaaaaccaaccaaccaacaaaacaaacaaaaaccaacaagaaaaaaaatgttgtcagtcatatttagaccatagtgagtctgcgttattgagagaaatagagagtttggggaaaaatgcctgttgagtgaggaagacatgaactcagtcacttacatgtccaggtacggtgttctatagtgcaccaagtagaaatgtccagtcatgagctggggtacaggcctgaggctaggaagacaaagcagtagccctttactgcaggattgattagacgagagagggcactggttaggacaaaggaatcaggcagaggaccattaccataattctagtttaggagaacagtattggtatggccataccatactgttggccataccaattggtatgaccataccatactgttggccataccaattggtatgaccaaattttccccagaaaggggaagctggagcctgagcaggcggtagagactattgcaagttcagtaagagacacatatgtttggggacatgcaaacatattcaattggcagtcagtttgcctcctgaaagggtgactggagctgagaacctacattgcctctagtgtagcatttccttaggtaggctctgagtcctctgagaaatgattccctctgatattcacagtgcacatgaatatatcagaggccctcagagtgttctgggaaagggaattgcttaattttgttaaacctaggttttcctaaactcatgtgactgccctgccttttttttcataaaacatctattaatttaatgaggactacactttggggaattgttctcctgttcgtgaagatatttcttagttgacaaagggaagcagaggagaaactggttagatagttgataaatctgtgaatattcaatgtgtccctattaagtcaccaaaacagactgaggaagcttccaaaaacccaggcctggcctggaaactgaggacactaacccctctgcatggggagcggtggtgaagtttgctgggggctttgatcaaagacagcttgctgtcttggctttctccctacactgcatgtgctagtgaagcctggccaatccctcccctagttcttttttatcctctacattggctccttgtccttgcttttccatttgcataactaatgcacacaacacagagttcccgcaattttaaagacagctggccagcacatcttggatgctgatgtcaggaaacatctggaagagggctaaagttactgaaggcccatctgagaacaatggaaacacattaatatggaaaattcagtattggggttggggggtggcttgtgtaaataaaaatggctgtcagaccaacttataaaagtcttgcgcaaaaccttattgtagttttggcactaataccacggagcaattgagtggtagtccagctaaaactgaaatattgctgctttgttttgtatatgtatcactgagaccttccttttcttaaaaggtttcctagaagtcctgccagctcagcaagatattctattctaaaaagttcataaaatagtgttttactttataataatattaagatgatctcccttctttctccttgttccctcttgctcaaaatataaggatataaaatagagttctgatacacctttttctgctatctctaagaagtcagtgttggccaggcatggtggccaacctcctgtaatctcagcactttgggaggctgaggcgggtggatcacctgaggtcaggagttcgggaccagcctgatcaacatggagaaaccctgtctctactaaaaatacaaaattagccgggcgtggtggtgcatgcctataatcccagctactcgggaggctgaggcaggagaatctcttgaacccaggagacggaggttgtggtgagccgagatcacgccattgcactccagcctgggcaacaggagtgaaattctgtctcaaaaaataaaagaagtcagtgttagtagaaatactaaggtttacaaatatttaaatgtgaacattatagaatgtgcacgaaaaatttacatgtgaacattctttttctttttttcttttttattttttcttttgagacagagtctctctctgtcacccaggcttgactgcagtggtatattgtgtgatctcagctcactgcagcctccacctcccaggcacaagcaatcctcctgcctcagccccttatcctgagtagctgggactacaggcacatgccaccacacctggctaatttttgtattttttgtagagacggagtttcaaatattgcccaggctggtctcaaactcctggactcaagcaatccacccgccttggcctcccacagtgctgggattacagaaatgagccaccgcactgcaacattatttttcagggctgtgtggcatagtagttaaataaacagattttggagtttgaattctagctcctcctcttacccaattatatgaaactttgagaaaattacttaattagcataacttcattttgaaaattataactatttttgccagttggaattgtcatgaggagtgcacaagctaatatatgttttcagtgcttaatgattagttgtccaggttagctattcttactgtggttttgttgatatataaggattaagaagaaatccctgctataatctattttgcaatccaactccaaaacactgagcatttgctttcaatttcctgcccaacagatatatgttttggaatcagggtttctccccctaagtgttactttaaagttctacctactgtttcactttattttgtagaaactgaaaatggcatcttgtctcttgtacaactacaagttcatgattactatctcatattgttttctgacatttgaattcttggtcttgatacctgctttttccctctgaaagcttgttggattttctcctatttctaagggtctgacatttcacaatggtctattttcatccattgtctaggtattttgggggcgctatcaatctggcagctcacatcctttggtttttgaaatcttgaattattgatttattatgagctcctccccatcaatttttctgttctctttctttctggaactcctgtttattgaaatattgtaccttgtagactgatcctctgattgttttttctttcctattgtccttttctttgtcttttagctttattttcctagtttctcaactttatcatataaactgtctaagttttaaaattccattattatatttcaaatttctaagagttattttttgttctttttatttcatcctgttcttataacatctttttacttctctgaagatattattagcttttttaaaagcttttatttccctgcatattctcaagactttgtttcctctctaatttttgttttgttttgtttttcgttgtttgttgttgttgtttttttttttttaacttttgtgtgttctgtctctctcttctttggtaggggcttttttcagatgtctgataattctggcccttcacttgtattttagagctaatgggcacctctgtgccatggatgaagcttgttaccttttgtctttagaatgatcagtctgggccatttctatgggagggggatgtccttgtctttaggtcttttttcttggtctgagcaagttttctagaaggtaaatgtctcctctccttcctagaatggttccttatgctggctgcctctgttctggaggttgaatttggactgagaatagtgcttcattatataagccttttttcaaatctgtctgctttcagcataatattcccagtctttatcgtgcctagtgtcctagctctggcttagagaccctctgttatatcttctgcagcagtcactaaactgcatttgggagggaggcttttggggtagcctaccctgggaaatggcttgcttcttggtttcccctgtgctgatttagaatttagccttcttagtttgttacgtgatatgcaaagtatcctattttttagctcttaaaattttgttgctgtcattattttctcccccttttaatttgttaaaatccttttatttttaatttaatagaggtttgggggtaaacacatttgttcaatcagccatctttaatcagcatttttaaaaagatattcttggccaggcatggtggctcatgcctgtgatctcagcattttgggaggctgaggtgggaggattgcttgagctcagaagttcaaggctgcaatgagccatgatcatgccactgcactccagccttggtgacagaaggaaagcccatctcagaggtttatcagtccattcttgtgttgctataaaggaatactcaagcttggtgatttataaggtaaagaggtttattttggctcatggttccacaggctggatgagaagcatgcgccagcatctgcttctgatggggactcaggaagcttccaatcatggcagaaggtgaaggggagctgatgtgtcacatggcaaagagggagcaaaagagacagtgaggaattgctaggcttgttttaaacaaccagatctcttgtgaactcatagagtgagaactcactcattatgtcgaggacagcaccaaccctcttatgaaggatccacccccatgacgcaaacacctcccaagaggcccacctccaacactggaggtcacatttcaacatgagacttggagggtataaacatccaaaccaaaatgagggtggggaggagatattcttaatgtaatactttttttctgaaaaattagattttctgtgccagaatcccaaatctaagaaatctaagataaagtaatgtgcctgagaatagctttgtaaatgtgttcatttaatttctaactgggttttaatattttggccgtcataactgttgtgtggtaaatatttctgtttgttggcaaaacccttttgggttgttcatcaccttttatgtcattatagatgtaaacaacatgtgtgctccagatggactctgaaatccaggctcccactttatgacacactcctctacaacaccagagactcccaaacacaaggccttatattgactcatttcagctcacatcctggcgactctcaagagagaaacctcagagtgactaaaatctccataatgagaagacatgtacattcagtatctattttggtaggagactttatattcagccttctttctgtagagtaagacgtggagatttggacttagggtgggctgtatgtggggtggagagtaacaagataagcaaggaattaactccatagtaaatgttaacactttctacatctttaaccccaattttatgtgccaaagaaagaatccccacaactgataccttcctggcagaactgacttcaggaaaggcaactcaggcagatattcgagtaggcctagactgtgtgggcctgtggccagtctcacaacaaaacagaatcaacagccttgcagtctcagaaatgcagtggtcattctggtaagcaatagtcaaaactaaaatttcttaaactgattttttgcctctatggtcaaaggagaactgatcctacttgttatttcatagatggaaaaatccatttgccaatcaggatgtgtctgatactccttttttttttggtttcaagagtaaagtcaagaaaagctgctttttgaaagtcaaagaatcacagtagttgttatttcttagtgcttactatttgctacatgcttcacatacgtggtctcatttaatcttcccaaacaattttgccataatattattacaaccatgttgaatctgaaaataataataataataataataataataaggcttagagaggttgagtaacttacctaaggttaccaaattagtaaagactgaactgggatttaaaagcaagatttgtagaatttttctccaaaacccagaatctctgcattgagccagcctgccattctgagacagacaacattcataacacttgcatattgtttgtacagtgttcattgtttaatgtagggcacatttcatacataccaagaggaatcatatgcttattcttgctagtatatggcaaacttttccattctataatacaaatatgactgatgactgctgtcatcagcccagcaaatcacctttcatcacaggtacacagatgacaaatacagagtacggaaggagtcagctgaaggtgctgcttgcctgggctgtcttttttttttttttgttacatctgccacttcatttattttatttgcaggaggagttgaaaccaattttaagggagattttcattttccccctaaacatgaatcattcaagtaaaaccaacttaactatagaaatgtagcaaagtaaggggaaagcagcacaacaacccaagaggcaaaggctggggggaaggggtgggtgcagtctgcgtataacatatgcacaaatgccttatgattcccctgctcaggaccgcctccccagaaggcaagcacaagggcccattttaagaggatgtttccccccaaacatctgagagcgcttcaacttaaacagcttacggttaaaaagacaaaaaagaaagcaaaactaaccaaagaaactccaaaaaaccccatgaaccacccagccataactgccttccttaatcgatcataggagtttcattttataaaaagataaataaaaaacattgaaaaaaatattttatcatgttatatttgtaaagataatagaattcatacgtttcttagaaaacagaccagacactgccctccagtttccaccccattgctgggaggatcagcaggactagaaagtttgggatactggagctgccggtggagaatgggaagtccagcccagaagaaattaggaaatagggctcaggggcacgtgaggtgtggttaggagcaactccacgtgatacatggctgcacagaaaaggggaacacaggtgatcggaaaggccttaaactcctccttgacatacaaaaccgattttcacaaagatccaggcagtttggtcccaaactaaggtgaacacttcaaagtttattcacatgctttactttctcttttaagaatcatcgtttcccaaattaaattagatttaaattataatgttactacatatgcctaaaaaaagaaaagaaaaaaaaagaaaggcttttaaaatcaggacaggggagaagagattgaaaatcatcaaattagtcctcttagctccaaatgaaatgaaattaagaacaaaaactctgggcctaccgcaccgattgcagctgcagcttgcaatggcaccttgggctgtcattttatccaaaacaatcactgctccgtagaaagactgcaaagacttggagtcctgtgtttcagtcctggtgttggtgctaaccagttgtattgggcttgttacctacgaagaaaactcacctttgttaaatgcccagtgtgtattgggcacggctttcttttttaatttatgtggttttctttagaagcccatacgtgtccaagggttatgaaggatgctaaagttagactcttccacccatggcccccagcctgtgatcccattcccagtgttatctattgttaccaattttgcataatacttctagagtaccaggaactttaaatatattatgtcagttaagtttcctggttattgctccaatttaatttaatttaatttaatttaatttttttgtctttttcaggatttagggcaggaaaggcaggctagtgtatgtactcagtctgcatatttgctccaatttataaccctattttacagtttctgaaattgagcttagtagctacttgcaaataactaattagtagtggagctaagattaattcaccctttctgtactcactgaataactataatggtaccatgctaggctttgaggatgggatcatgaggcacatagatccttcctgtcagtctagtggaggggttttcttttttttattaattttttttctttaattagggataggatctcactgtgttgcccaaggctggtcttgaactcctgggctcaagcagtcttcccacctcagcctcccaaagtgctgggattacaggcctaagccaccttgctcagccaagtgaagaagttttaaaaagtaaatagataagctactgcttccactgtcaccatgtgatgtgcctgctcccactttgccttctgccataaccaaaagttcctgaagccctcaccagaagctgaatagatgttggtgctacgcttgtatagtcagcagaaccgtgagccagttaaacctctgttctttataaattgcccagtctctggtatacctttatagtaatgcgaaagtggactgatacagaaaattggtactgatgagtggggtgtagctataaagatatttgaagatgtagaaatggctttggaactgggtcacaggcagaggttggaagagtttggagggctcagaagaagacaggaagatgagagaaggtttggaactgcttcaaggctggttaaatggttgtgaccaaaatgctgatagagatattgacagtaaagtccaggctgatcaggtctcagatggaaatggggaaactgttgggaactgcagtacaggttactcatgttatgccctaacaaagagcttggctttattgtgttcatgccctaggggtctgtgggagtttgaacttaagagtgatgactggctgagcacggtggctcatgcctgtaatcccagcactttgggaggtcaaggcaggcagataacctgaggttgggagttcaagaccagcctgaccaacatggagaaaccccatctctactaaaaatacaaaattagccgggcatggtgacacatgcctataatcccagctacttgggaagctgaggcaggagaatcacttgaactggggaggcagaggttgcggtgaaccaagatcacaccattgcactccagcctgggcaacaagagcgaaactccatctcaaaaaaaaaaaaaaaaaagaatgatgacctagaatatctggcagaagaaatttctaagcaacaaagcattcaagatgtgccctggctgcttctaatcacccacaatcagatgcaggagcaaagaaatgacttaaagttggaacttacatttaaaagggaagcagactgtaaaagtttggaaaatttgtagccttgccatgtggcagagaaagaaaaacactttcaggagagaaacacaagcaggctgcagaataaccacttgctagagagattagcatgactaaatgggagccaagtgctaacagccaagacaatgggaaaaaggcctcaaaggtgtttcagggatcttctaggaagtccctcccatcacaggctcagaggcttaggaggaaataatagtttcaggggccagatccaggacatcactgctctgtggaacctcaggaacactgctccccacatcctggctgttctggctccagccttggctcaaaggggcccaggtacaacttgtgctgcagttctagagggtataatccataagtcttggcagtttccatgtggtgttaattctgcaggtgctcagaatgcaagtgtgaagaaggcttgatggtttcctcctagattctggatatatggaaaagcctgggtgtccaggcagaagcctgccacaggggtggagcccctagagagaaactctactaaggcaatgcctaggggagatgtggattccagtccccaccacagtgtccccaccagggcactgcctcatggagctgttggtgggggcccactgtattagtctgttctcacactgctaataaagacatgcctgaaaatgggtaatttataaaggaaagaggtttaattgactcacagttcaacatggctggggagtcctcaggaaacttacaatcatggcagaagtgaaacaggcacgtcttacatggtggcaggtgagagaagtgaaaaccaagtgaaggaggaagccccttagaaaactatcagatctcgtgagaactcactcactatcacgagaacagtatggggggaactgccctcatgattcaattatcttcacctaggcctgcccttgacacatggggattattacaattcaagatgagatttgggtggggacacagagccaaaccacatcacccaccatcctccatattccagaatgatagattcactggcagcttgcaccttcttcctggaaaacatgcaagtactcaactccaacctgtgagagcaatcacatgggctgcatcctgcaaagccatgtgggcaaggctgctcaaggccttggaagcctatccttcacatcaggatgcaggacttggaatcaaggattatgttggaactttaagatttaatgcctgccctcctgggttccagacctgcatgggcctattacccctttcctttggccaactcctcccttttggaataggaatgtttacccaatgcctgtactaccactgtatctttgaattcaataacttgtttttttattttacaggtttatagatagaaggaacttggccttgagtttcagatgagactttggacttttggacttttgagttaaggctggaacaagttaagactttaggggactattacaaaggcatgattgtattttgaaatgtgagaaggacatgagatttgggggtgcagtggcagaatagtatagtttggatgtttgtcccttccaaatcttatgttgtaatgtaatctccggtgttggtggtgggacctggtgggaggaggttggatcatggggctttgggtagtgtggacatattaacaatattgattcttccagtccatgaacatggaatatatttccatttatttgtgtccttttcaatttttttcatcaatgttttatagttgtcatgatccctcgtgaatggcttagcatcatcccctgggtgatgagtgagttctcactctggtattttacatgagatctgtttgtttaaaagactgtggcacctttcccctctctcttgctcccactcttgccacatgacatgcctgctcccacttaccttctgctatgattataagcttcctgaggccctcaccagaagctgagcagatgttggtgccatgcttgtacagcctgttgaattgtgagccaattaaacctcttttatttataaattccccagccttaggtattcctttatagcaatataaaaataaactaaaacatctatcatgtgctgtggttcttactggagcaccatcaactcaacttgtagcactgaggaaagctgttagaaaaagtgacctccgtgctaagacatcaggaatgagctaggagttagccaggtgaaggggaaaatgttagaggatggacagaagagtaatcttaagcctgatgttttgggaggctttcagggtgactggaactgttgtgggagtgtgcccaaggtgactggggaggggtaaactgaagactgagtagttcagatattgtaaagcctgtgaggatttagtaggggagtgatgtgatcacattctaactatgggatggagaatgaattcaaaaacgccatgctcgttgagaggctgccacaggggagaacccatagcagcctgagtcaaggtcaatgctgaggtatttgggaagcagaagcaaaagaccttcagggactggtatgcagcaatgatcatgagaatagattctgtaaccaccaggaatctttgctctgttgtttcctgatagcagaaccattggacattgaattgtttgtgatattgtacagggcattgttataacctttttaaatatcacttttctaatttgcaagatgggagtaaaaatggggtcaaaatggggatactattagtacttaccttgtaaggtcatcataagaactaaaagagaattcctgtaaaggttggttgtagtgtagttcccacatatattaagcatttaggaaatctcaaagcaaagggaggagccaagcatgtctttccaggtacaaccttgggcatctaagtgcttggtgttgccagtctctgtgttgaggaacacagaaaagggacagatttggaggaaggtgataaattcggcctgcatttgtttgagtccaaagcccaaatctcttcactacaccagtttccttaaagacactgccacttcctatctgtgtgatttttttttttttttttttttttgagacagagtctcgctctgtcgcccaggctggagtgcagtggcgtgatctcggctcactgcaagctccacctcctgggttcacgccattctcctgcctcagcctcccgagtagctgggactacaggcgcccaccaccacacccggctaattttttgtattttttggtagagacgggatttcaccatgttagccaggatagtctcaatctcctgacctcatgatccacccgcctcggcctcccaaagtgctgggattacaggcatgagccactgcgtccggcctcctgtgtgatcttttttaaatatatatatatatatttttttcttttcttttcttgttttttttttttttgagatggagccttgctctgtcgcccaggctggagtgcagtggtatgatctcggctcactgcagcctctgcctcctgagttcaagcaattctcctgccccagcctcccaggtacctgggattacaggcgcctgccatcatgcccagagaatttttgtatttttagtagagatggggtttcaccatgttggccaggctgatctcaaactcctgacctcaagtgattcgcctgccttggcctcccaaagtgctgtgattacaggtgtaagccactgcgcccatccctttaataatttttttatttttaatttttatgagtacatagtaggtacatatatttatgaagtgggtgaaatattttcatacaggcatacaatgaacaataatcccatcagggtaaatggggtatcatcacctcaagcttttatcatttctctgtgatataaacattcagattatattcttattttaaaatgtacaataaattattgttggctgtagtcaccctgttgtgctgtcaaatactagatcttattctttctatctacctatatttttgtatgtattaaccatccccacttgcatccaccttcactatctttcccagcctctggtaatcatcattctacactctatctccatgcattcaagtgttttaatttttacctttcacaaatgattgagaacatgcaaagtttgtccttctgtgcctggcttacttcacttaccataatgtgttccaattccatctgtgttgcaaatgacaggatcttattctttttatggctgaacagtactctattgtgtatgtgtaccatattttctctatccattcatctactgatgaacacttaggttgattccaaatcttggctattatgaatagtgctgcagtgaacatggagtgcagacatctcttcgatataatgattttctttattttgcgtgtatacctagcagtgggattgctggatcatatggtagttttttagttttttgagacaccaccatactgttctgcataattgctgtattaatttacattctcaccaacagtgtatgagggttctcgtttctctgcatccttgcattattgcctgtcttttggatacaagccactttaactggggtcagatgatatcccattttgttttggtttgcatttctctgatgatcaataatgttgaacaccttttcaggcacctgcttgccatttgtatgtcttcttttgagaaatgtctgtttagatattttgcccatttcaattggattattattttatttttccccattgagttatgtatcttctatttattaatcccttgtttttttgttgttgtttgtttgttttgtttttgagacagagtcttgctcttgctcttgctctgtcgcccaggctggagtgcagtgatgcgatctcggctcactgcaacctctgcctcccgggttcaagcaattctccttcctcagcctcctgagtagctgagattacaggcgcctgccaccatgcccagctaatttttttgtatttttagtagagacggggtttccccatgttggtcaggctggtctcgaacccctgacctcgtgatccacctgcctcggcctcccaaagtgctgggattataggcgtgagccaccgcgcccagcctattaatcccttgttagatggatggtgtgcaaatattttctcccacttcgctttgtcttttcacttcattgataatatcctttgctgtccaaaagctttttaacttgatttgattcaatttgtccatttttgctttggttgcttggcccagaccaatgttctggagagtttctcctatgttttcttttagttgttttatagtttcaggtcttatatttaagtctttaatccatttatatttgatttttatatatcaagatatacaaaatacaagatattttgtatatcaagagatagtaatctagttttattattccacagatggatatccagttttcccatcattatttgttgaagagactgtcctttccccagtgtatgttcttggtacctttgttgaaaatgaattcactgtagatgtatagattgatttctgggttctctattctgggttctctattctgtcccattggtctgtgtttctgttttatgccagtaccttgctgtttcagttactatagctctgtgatataatttgaagtcaagtaatgtgattcctccagttttgttctttttgctcaaaatggctatgactattctaggtctttggtggttccatatacattttaggatttttttttctgtttatgtgaagaatgtcattggtattttgataaagctttcattaaatctgtagattgctttgcgtagtgtaggcatattaacaatactgattcttccaatccatgaacatggaatatatttccatttatttgtgtccttttcaacttttttcatcaatgttttatagttgtcatggtatagatcaccacttctttcgttaagcttatttccaggtatctaattttatttatagttattgtacatgggatattatcttgatttctttttcagattgtttgctgttggcatatagaaatgctactgatttttgtatgttggctttgtatcctgcaactttatgaaatttgtttattagttctaattgttttttgggggagtctttaggtttttccaaatataagatcatatcatctgcaaacaaggataatttgacttcttcttttccaatttgtatgccctttatgtttttctcttttatgattgctctagctagaacttccagtagtatgttgaataacagtggtgaaagtggagccatgcacggtggcttacacctgtaatcccagcactttgggaggactaggtgggtggattacctgaggtcaggagttcacgaccagcctggccaacatggtaaaaacccatctctactaaaaaatacaaaaattagctgtgtgcagtggccggcacctgtaatcccagctacttgggaggctgaggcaggaaaatcgcttgaacctgagaggcagaggttgcagtgagctgagatcgcaccattgcactccagcctgggcgacaagaatgaaactccgtctcaaacaaacaaacaaacaaacaaacaaacaaacagtggtgaaagtgggcatccttgttgtattcccaatcttagaggaaaggctttcagttttttcccattaagtgtgacactaactgtgggtctgtcatatatggcttttatcgtgttgaggtatattcctcaacacattacccagtttgttgagggttttcatcatgaagggatattgaattttatcaaatagtatttcaagattaattgaaatgatcagatggtttttatcttctgttgatatgatgtatcacattctttgatttgcatatgttgaatcattcttgcatccttgagataaattccacttggtcatggtgaattattttttaatgtgttgttgaattcagtttgctagtattttgttaaggatttttgcatcaatgttcatcagagatattggcctatagtgttcttttttctttttgttcctttttccttttctttctctctttttttttttaatgtgtctttgtctggtgttggtatcagggtaatactgacttcatagaatgagtttggaagaattcactcctcctctattttttggaatagtgtgagtagcattagtattagcttttctttttaaatgatttttttttttgagacggagtctcgctctgtcacccaggctggagtgcagtggcgtgatctcggctcactgcaagctctgcctcccaggttcacgccattctcctgcctcagcctcccgaggagctgggactacaggcgcctgccaccacgcccggctaattttttgtatttttagtagagacggggtttcaccgtgttggccaggatggtctcgatctcctgacctcgtgatccacccacctcggcctcccaaagtgctgggattacagacatgagccaccgcgcccggccttctttttaaatgttttgtaaaaattagcagcgaagccatagagtcccaggtttttttttgctggcatactttttattatagctttgatctcattgttttggtctcttcaggttttgaatctctttgtggttccatcttggtaggttgtgtgtttctaggaatttattcatttcttctaggttttccaatttattggcatatagttgctcatagtagtctctaatgatcttttgaacttctgtggtatcagttataatgtctcctttttcatctctgattttatttatctgagtcttctttctttttttcctagtctggctaaaggtttgttgattttatcttttcaaaaaaaaaagaaattttcattttattgttcctttgtattgttttttaaatttcatttttgtttatttctgctctgatctttattatttattctactaattttgggtttggtttgctcttgcctttctggttttttaagatgcatcattaagttgtttatttgaagtttttcctctttcttgatgtaggcatttattgctataaactttcctcttactactgcttttgctgtatcccataggttttggtatgttgtgtttttatttttatttgtttcaagaaattttttcttttaaaaaaaaatttttaaattttaaattttttctcaatcaatgccatgccagaatttcaagaaatctttaaagttgtttcttgatttcttcattgattcactggtcattcaggagcattgtttaatttccatgtgtttatatagttttcaaagttccttatgttattgatttctcgttttattccattgtgaacagagaaaatacttaaaatgattgcagtgttttcatagcctaataaatggtctgttcttgagaatgatccatgtcttgaggagaagaatgttaattctgtagccattggatgaaatgttttgtaaacatctactaggtccatttggtgtatagtgcagattaagtctgatgtttctttgttgatttgctgtctggatgatctgtgcaatgctaaaagcagggtgctaaagtctctagctattattatattaggatctatctctatctttagctctaataatatttgctttatatatctggatgctccattgttgagtgcatgtatatatttataattgttgtattatcttgctgaattgatgcctttatcattatataatgaccttctttgcctatttttatagtttttgacttgaaatctattttgtctaagtatagctactcctgctttttttcatttccattttcatggaatgtctttttccatccctttatttttagtctatgtgtgtctttataggtaaagtgtgttttgtgtaggtaacagataattgggtcttgtttttatatccattcagccactctatgtcttttgattggagagtttagttcatttacagtcaatgttatcgttggtaagtggggacttactcctgccagtttgttgttttttggttttatctcccttccttccttcttttctgtcttcctttttgtgaaaatgattttctctggtagtatgttttaatttcttgctttttattttttgcatatctgttgtgggttttttaattcaaggttaccatgaggcttgcaaataatgtcttataacccgttatttaaaactggtaacttaactctgattgcaaaaacaaagaaactaacaagccaagggaaaactaataaaaactatacttttacttcgtccctgcctcttacttttaactccttgtggtttctgtttctatcttattatactatctatatcttaaaagttattgtagttgttatttttgataggttcatctctttagtattcctactcaagatatgagtagtttatacaccacaattgtagtgttatagtattctgtatttgtctgtgtactcactattaccagtgagttttgtatgttcagatgatttcttattgctcattaattccctttagcatttcttataggacagatctgttattgacaaaatccctcagctttcatttatctgggaaagtctttatttctccttcatgtttgaaggatatttccacaggatatagttttctaagataaacatttttttctttcagtactttaaatatgtcatgccattgtttcccggcctgcaaggttcccactggaactcctttatgtgttacttgtttcttttcttttgctgcttttaggatcctttctttatccttgacctctgggagtttgattattaaatgtcttgatatggtcttatttgggttattctttttttttttctgtcttctttgctttttttttttttttttttttgagataggttctcactctgtcacccaggttggagtgcagtggcatgatctcagctcactgcaacctccacctcctgggctcaagcaatcttcctgcctcagcctcccaagtagctgggactacaggtgcaaaccaccatgccccactaatttttgtggttttggagagatggggtttcaccatgttgccgaggctagtcttgaactcctgagctcaagtgatccacccacctcagcctctcaaagagctaggattataggcatgagccaccactccaagcatgcccatgtattttcaaatagcctgtcttgaagctcactaatactttcttctgtttaagccattctgctgtagagagactctgatgcattcttcagtttctcaactgaatttttcagctccagaatttctccttgatttttaaaatttatttcaatttctgttaaacttatctaataggattttgaattccttttctgtgttaccttgaagttcattgagcttcctcaaaacagctattttgaattctgtctctaaaaggtcgcatgtctcggtcactctgggattggttactggtttcttatttagttcatttggtgaggtcctgtttttctggatggtcttgatgcttgtgaatattcatcaatgtctgggtactgaggagttaggtatttattctaatcttcacaatgtgggcttgtttgcactcacatttctcgagaatgttttccaagtactcaaaggaaattgagtgttgtgatctaagtctttggtcactgaagccatatatgcattaggaggcaccccaatcccagtaatgccatgactcttgcagacttgtagaagtactgccttggtagtcttagataagaactgggaggattccctggattaccaggcagtcttctattctcttccctactttccctcaaatagaatctctctctccattctgagctgcctggagttgggggaggggtgacacaagcactcttgtggccaccattgctgggactgtgctggatcacacctaaagccagtaaagtactgggtctcgcccaaggcctgtgtcaattattgcctggctattgcttatgtttactcaaggcctaagggctcattagtcaagaggtgatgaatcctgccaggcttgcgtctttcccttcagggcagtgggttcccttctggcccagggtgggtctagatatgctgtctggaagctaggacctggaattgggaactttaggaatctatttagtactttattttactgtggctaagctggtacccacattgcaagaaaatgacctttttattcttccctctcctttcctcaagcagaagtctctcttttcctcaagcagaagtctctccccatgtccaccaccaccatgagccccaggtccatggcaacaactgcctggctactgctgatgtttattcaaggcacaaggaccctttagtaagcaggtgaatcctgtcaggtctttgtatctcccttcaggacagtgggtttccttcagacctagggcagatctacaaatgccatccaggagctaaggcctggaattggggaccttaggggtctgtgtggtactttattttaccatggctgagctggtacccaaattgcaagacaaagtcctttttacttttccctctcctttcttctagcggaagctgtctttcccatggccaccataggtgagaacgtactgggtcacacctaaaagcagcactacctagctgtgtgatcttgagcgaattactcaatatcatcatctgcaaaatggaaatgatagtaaatagtacctttctcatatgattgttataaggattaaatgagttaacatgtgaacctggtatattattagctactgtaattggttgtaaaagtctggatatacctaatggtacactttttaaaaaatctttttgcctctaatattacaggttgaatgtcaggcatgccatctcttttcaaatagatttaaactaaaaacattattaaagaagaaatgagagattgctctggctacaggatgaagaaatgatcagagtcagggcaggattcaccaggagagcaactcagtagtgagttccagttagttctagaggctatgatgcagctatcttacagataagcacgcggggcaagttgctaggggaacccaggctctaaaattgcagttgaagtaggtaagctctaaaattgcagtaggtaaaaggtaatatgggtaagataattgctgctggtagaactcaatgagagggaaggcctgggggagactgtcagtagtgaacctggggcctagaggcaacaataaaagtaatgcttattttcagttcctgcagtctgtggctccttcaaacatattcctgagggcaaaaggtaactgaccttagggtgaggtagttggacgacagagtatataggtaaagcaaagaaaggcattgtagagctacacacagcatttgcaaagccataaaatgtgcaacagatgtactcagaactcccatagttcagaagcggggtggatagcaatgagagaagagaccccaggagaatggagaaggggctagattatgctgtcttgtatgctatgcatggcagcctctttttagtgcctgcttagtatttatctatccctcagggaatatgaccctattcctagctcaggggtaaatcctgatagtctacaccaatcataataatctatttcatttcctagcattggtttaggtgtgtgtgtgtaacccagtgtagtcaatgagacatagagaaaagttgcctaggaggtctttgggaaagatttcttcactctattatttatatatatatagagagagatggtgtcttgctgtatgtattgcccaggctggagtgcagtggctattcataggtattcattggtatgaccatagccttgaactcctggcctcaagggatcctccagcctcagcctccttatagccttggacttcagctactggccaccatccctagctggtttcttcactcttaaaggatacctaaggaatagtcagtctcttttcttccactgatgttgatgtctgagatgtgatgcctggaaatagggctactatgttgtgaccatgaatggatctagcctgaaaaccaagctcgaatactccaagaatggtagagcagagatagaacaaactggagtcatttatgtcattgtggggcactgcatcagccaaacataaaggtgctctacttggtaacctcttgctatttgagataataaatgtttcctattgtttaagccaatctgagatagggctttctgttatttgtggctgaaggcatggtaattgaaacaacatgcaaagaaacttagccttatcatgtagggaacatgagatcaaaaaaagatctttaagcaagaagtgacaatagcatttttttgcattgtggactaagcagtctgtcaaataaattcactataattttaacatttaaatgtaccccaagttgattttgtcccatgatataacaaataccatatgttatattacatatgccatttagtttgaagtaaatttacaaactggaatttaaaatgataacgtctactctgctaatgatgttgagtatgtactagaggaagtgagagtgaagaaaaatgatcagttaagtccatgagaagtaatgagaactttaatgaggaggaattgatgaatcaagaagcaatatcatctggacttagtgatgactggtggtaaaaggggaggattacaaaatgattccaaaatgttgggcttggatttccagggctctatttaccaggagaagagcctgaagaaggttttggttgcagtgaccagaaacctaatcaagctagctaaggaaggatacaggagtatctctcagagcccagagcaagaagtttcactgggcctcagccagagtagactgaaccctagggaactggattctacctgttctgggtgatggcatatggtctgtcatttctgcttctctcagcacatcagcctcattttctccagactggttttctctgttgggcgtggtgatcttatagttatcccagccccagctttcttggacccagcagagactaactcaggtcttctatgtttcagttccaaactctcgggagagagactctaaatagtccatcttcgatcaggtgcccattctttgtcctgagagttctggttgaacagctaaattagtggtttgtaaggcaattcctcccaggattataagagagcatgtcctctaaaaggggatatgggaatagcgaaacagtaaattgatggaggagatgattacatttcaagtatattagtggctacaaatgatgaaacagatagggatgggagcaaatgataaattaaaatttgaatatattaattttgtggagctcaagggaccatcagtggaaaatgtcttttaagcagagatctgaactgaagttggaaaggtgacaccatcagaatgtaggtgggaataaaaaaagaaagaaggctgggtacagtggagcacacctgtaatcccaacaatttgaaaggcagaggtgggaggattgctcgagcccaggagttcgaaagcagcctgagcaacatggtgaaaccccgtctctacaaaaaatacaaaaattagctgggtgtgatagcacacaactatagtcccagctactcgagtggctgaggtgggaggatttcttgaccccaggaggttgggcctgcagtgagccaggatcgccccatggcactccagcctgggtgacagagtgagacactgtctcaaaaaggaaaaaaaaaaaaagaataatgagatatgagacagacctatcagaaggatcacatagactgagaagaggagagtcaaggtttgtgctaccagacacactgatttgtttttattttatctacttttaaagtaatgaatagttcaatttttagaatcttgaaatggtatttataaagagtttccttcccacccgtgtcccagccatacatttcccttccctgtaggcgatatcatcatttatatcttttcaaagatcagctgggcgtggtggctgacgcctgtaatcctaacactttgggaggctgaggcggaagggcatttgaacccaggaactcaagaccaccctgggcaacatagcgagaccctgtctctacttatgtgattatatatatatatattttctaaataaaaaatgttaaaaaatgataatctatgcatgtaccagtaaatacctttattatttctacaccccccatatttttcaaacacaaatagtaatataccatttacttaacttatttaaacaattccttagtgatggatgtttaaagtgttttcaacttttgctattatgaacaaaacaacaatgaataactggagtgcaattttttttaaagaaatgggtgaagaagataaactaatgaagagccttgaggaggtcgtcaatggctcttgctcccacagtgccactcaaactacagtaacaggagccatccataatctccaccccagctcgtctctcttggacattgcatgctgtcatgcttctcccttggctgtcacacccccttcccattggttttccactcgcttatctactctttgccagacccctggctcttgtctaaatctatcctgttctttttctttttctttttttttaaaggcagaatcttgttctattgcccaggctgaagtgcagtggtgcaatctcagctcactgcaacctccacctcccaggttccagagattctcctgcctcagcctcctgagtagctgggattacaggcgcatgccaccatgcccagctaatttttgtatttttagtagagacggggtttcaccatgttggccaggctggtatagaattcctgacctcaagtgatccatccgctttgacctcccaaagtgctgggattacaggcatgagcccctgtacccagcctaaatatcctaagtgaggcagggcaactgcaagaagttattctgtggttacacctctggaatctagaaaggcctttaagtgtaaacccattatgaaaactaacaatctcactaatagggatacattaatatcattcctcaatatttactagccatgtgaccttggacaaactcattgacctttctgagccttactttcctcacttgtaaaatcaaaagaataatagtatccctttcatagggtggttgtgaggatgaaatgaaaagatgtatgtaagcactcagaaataatacttggcagtcgcactctttgcagaagataatgaaaagcatttcatagtaacagctcattgcatttcagctaatatagagctatccccagatgggcacctgggaattcctttccccatctttgtctttttgtcttttctattttaccctattgcacatcccccagggtccatgcttcatcctgccagagccacaggaggttcaaggccaaagtcaagttgggaagactgaaggtggcttcttacagctttccatggcggtttctgcagacaaataaatctacttcaatccacttttatactaaattatcctctttctacctagggtggggagatctctgtctccctgcagtttaatacaatagcttgaaggataaggactaagtaaggaggcagataatgtaaaagtagactatactttttgaaaccttggtagtgaagagaagagagacagaaacactaataacagggttaagattgcaatcatttgaaatttaggcttatttacagtctattcgatattgtatgttgaatgatgcagtccaagctggggaaaataggcttttgtagaggagtatgcttctcttctagaccagagaggtttgttcattctggagcactcaaagcaaccaactccaacttcaccaaagtagaaaaaccagcctcttaacaaagaaattctttgcagtccttggttcccatggccaattttaaagtcaaaagacctcaatacattttttttgcttttatcaatttaatacattcacttactattattatctgccttcaaaaacatctgactttagggatgacagttttcactatcctggggaattaaccttaaaactaataagtgtctctatggtgcagccaaagttacaaagccagactgaagtctgcagataccaatgatggttggtctttgtttaaccactaatcactaagagacctgactcccaggggtcttaaatgttagggtggaagatggtggatcagtctacggtacttacttcctgacagcaagtcagaaagttgatctttttttacatttaaatttaatttttattttactgtagtaagaacatttaacatgagagctaccctcttaacagatttttaagtatgcaataccatattgtcaactataggcacaatgttgtacagcagctttctagaacttattcatctcacataactgaaactttagcaactccctgttttctcttcccctccttctgcttctataaatttgactattttaggtttttcctgtaagtggaatcatgcaatatttgtccttctgtggctggcttattttacttagcataatgtccttaagtttcatctatgttgtcacatattcaggatttccttctgttttaaagctgaataatattctattgtgtatatacaccacattttcttatccattcatctattgatgaacatttaaattgtttccacatcttggctattatgaatagtgctgcaatgaacataggagtgcaaatatttctttgagatcctgatgtcaattctattggataaaatttctgaaataaagaactcccacaactcaacagcaaaaaaactaacacctgattttaaaatggactaaggatttgaatatacatttctccaaataaagacatacagatggccaataggtatattaaaaaatgttcaattccactaatcatcaggaaaatataaatcaaaaccacaatgaggtatcacctcactcctgttgaaatgactgttaccaaaaagacaaaagataagaggtgttagtgaggatgtggtaaaattggaacacttgttcactgttggtggaaatgtaaaatggtacagccactgtggaaaacagcatggaggttcttcaaaaagtgaaaaatataacatataatcagccatctacttctgagtatttatttaaaaagttgatcttgattgacaacccgaagttagagaaaatgtgggaaaactcttacaccacacattcagtctctttggatggcagtttatttagatgtatcaaattgttttgacccagcaattctacttcttgtattgaaagctgtaagtacaagatgtatgtacaaggtactacagatgtatgttctttgcagcattgtttgataaatgtatccatctttcactaaaaataaaactgaaagcaaccaaaatgtttgtaagtatgtaactggttttatataatacagccaccaatattacataatacatatgttaaaaagaaaaataagagtcaatttttatttcagagacagggccttgctctgtcattcaggctggagtgaagtggcatggtcatagctcactgcagccccaaactcctgggctcaagcaatcctcctaccccagcctcctgagtagctgggactacaggtgcatggcattaagcctggttaattcttttttcatttttttttttttagaaatggtgtctctctatgttgcctaggctggtctcaaactcctggcctcaagtgatcctcccatctcagcctcccaaatacgtttttttgtttgtttgtttgtttggttggttggttttttttgagacagggtctcactttgtcacccaggctggagtgcagtggcacaacgttggctcactgcaacctccgcctcctgggttcaagcaattcttctgcctcagcctcccaagtagctgagattacaggtgcctgccaccacactgggctaatttttgtattttgagtagagacagggtttcgccatgttggccaggctggtcttgaactcctgacctcaggtgatctgcctgcctcggcctcccaaagtgctgggattacaggcatgagccactgtgcccggccccagataagtattttacatatataccctcatttgatattcacaacagctctacatgtaaggtaatcatacatcttgatttgccagaacagtctccatttatacctgtcacaatataatgattagtagtgcccccttcattctcaaaagtacctctcttggacagtaaattgtgtggtcaccttatctatgaggaggttattgtcatcaccttattgaatagctgaggaaagggaagtgttaagtaactttcccacattcacacaagtagaaggagagaccagcagagatttaccatgatgtcagaatacagttctgaatttcttggggcaaagaaatgttgcctgtctctctaggacgccatcggcttccaatcaaagcttgagaaatcagccctggaaaattgggaaatgctagtggcaggcttgcagatggaaggcagtgtaggacagttaagtctgtccatttcctcataaaagtatatcattattccacctgagaggtttttatcatcatccctaggagctcatcacttttctttgccaacctttggctccctctcaggaattaaggcctggttttacctttctgtgttggcattttactttttttttttttcccaccattccatctgttctctttccctgaactcccaacagaggtgatgctttgagggcagggataatcatgggcataatgatatttatctaacttatctatactgtgctaggatcagtccagctaaactaggtaaattcctcttgtgtttactattttactgggagccaacttatctggaaaggctgaacagtacagagaaaagaggctagaatttcaggaagttaggacatattcattggtgaatatgttggctgccatattgttatatcatgctcaaaataaccctaaaaggtaggcagtattgtcctaattttctgatgtggaaattataaagcacataaatatatctcactaaattcaaacatatgtatccattcttaactcttccttaacttggtattccaaaatgctcatcgccaacccaacagaagtcagagaggaaaacaacaacctttactgattgcagttgaaatattctacttttataaattttacaaaaacatatggccttgggccaggcgcagtggctcatgcctgtaatcccagcactttgggaggccaaggcgggcagatcaccggaggtcaggagttcaagaccagcctggctaacatggtgaaaccccgtttctactaaaaatacaaaaaattagccgggcatggtgatgcatgcctgtaatcccagatactagggaggcagaggcaggaaaatcatttgaactgggaggcggaggttgcagtgagccgagatcacgccactgcaccattgcactccagcttgggcaacaagagcgaaactccatcaaaaaaaaaaaaaaaaaaatacttgtgaacacgttaatataattcctccaggaccttggaaagttcccatgaattgagggtcctgatgtttaagatttattagtttcatgaaaaatctgtaaatccatttctgataacggagatagaatttggtagatgagggagaaattccaaacttgtgtgtcactggcagctggtacataaagaaattgatactgtaagccttcacagtggcagggtagggcttggcgacttgcctcaggctgtggatcaaagggctccagagtgtgggatctaatggcatagactgtggtccctgcagagtaggtagtgagcatggtgagtaatgtctgccactcactgcttcctgtgattaacagaacatgacaattaagcagaatgtactactggccattatggaaaaagggcctgcagaactgccaggggagtttgtgttccagatgaagggaggctgacttgggactccacagttctaagggatggcctcaaacctgtctttacataagttggccacttctgtctatttgttgcttaggtaccctcctattagcatccactctagctgcacagtaattataatcactgtgtataagtgttctgtgaattagagcttcaagataattttgaaatagttgagatgaaaagttagactagattagaaatccatctcattatctcaagaaatgcaccattacatttgccaatgatgttaggttgaatataacatcaactgtgaatataacatcaactggctgggtgtggtggcccccgcctgtaatccccgcactttgagaggccaaaacaggtggatcagctgagatcaggagttcgagatcagcctggccaacatggtgaaaccccgtctccactaaaaaaaaaaaaatacaaaaattagctgggtgtggtggcaggcacctgtagtaccaactactaggaggctgaggcaggagaattgcttcaacttgggaggcagaggtagcagtgagctgagatcgctgtgtcacccaggctggagagcagtggtgcaatcttgtctcactgcaacctctgcttcccagattcaagcgattctcctgcctcagcctcccgagtaactgggattataggcacgcgtcacgacaccgcgttgattttgtatttttagtagagatggggtttcaccatgttggcctggctggtctcaaactgctgacctcagttgatccacccgtctcggcctcccaaagtgctgggattacaggcgtgatacattagatagattgagttttaggttcctgtgggaacaccgtaggagacattaagtggtgtctaatactggaaagtgctctgtagatatacatttggagcttgtcagtgtatgaaaggtagtccaagtcatgggaatggatgagtttgaccaagacactggataatgggaagacaatagagccaacaacagaattttgggatcactactttaatattacgtgccagagctgtttgtatatacagtggtttctttcataaatgtatttgggaggaaagcatttttagcaaatatgaaattgctcctgtaggggagtatcaagttgcctagggactgtgccctctccatttaagagtctcagccgggtgcggtggctcactcctgtaatcccagcactttgggaggctgagatgggcggatgacctgaggtaaggagttcaagatcagcctgaccaacatggtgacaccccgtctctcctaaaaatacaaaattagctgggcgtggtggcgcatgcctgtaatgccagctactccagaggctgaggcaggagaattgcttgaacctgggaggcagacgttgcagtgagccaagatcgccccattgctccagcctgagtaacaagagggaaactccgtctaaaaaaaaaaaaaagagtctcaaggttatctagttgactgaggagggtggatggtggtgacagacttcaggatttaacataatctttctggttgctccttctctgactcttttgctgactttcactattgaaaagcatgcacactgccaatcccattgctttccctgctctccctttattgtctcccttaaaaagtcagtggtgtgtggcaagcagggcatgtaccttgaaaataggcagacccggtttagaatcccagctaactgtgcgcatgggcaaattacttagtctctctaatcctctgtttttctcatcataaatctgaactaacaatatctgccaggcagggttgctgtaaggactggaaacagtatgtaaaagcaccctgcaaaaaacctgatgtactgaagctgtgcttaccatcatcagacaggtcatctaccctaaaggattttttttcttgttccttctttccgcaaaaaaaacacaaagaatctagtctgacaaggattttgccctgattcaataaaaatgagactggattttcatattgttgaagagatgatgaggactcccctttaaaaccagagatgctaaaatccttaaattatctggaaagattcttactaaattttgctgataaagaatcaatactgaagattttttttgtctctttcccttctctttttggggaaatcagaattcctgttctgaaatgtaagtagatctttatcttaaaaataggttgacaaggacatctctctcctttttctttaagcagatggtaatttgtgattttttccccctggtgctggattccgcctggaggtattaggtgtggacattaggacatggtcaatgttccaccataattccttaccagtagataccagtttctgcaaataacttctgcattgaaattttgagttctaggctgggcgcggtggctcacgcctgtaatcccagcactttgggaagctgagacgggccgatcacgaggtcaggagatcgagaccatggtgaaacctcatctctactaaaaacacaaaaaattagctgggcatggtggtggacgcctgtagtctcagctactcgggaggctgaggcaggagaatggcgtgacccctgggaggcagagcttgcagtgagccgagatcgtgccactgcactccagcctgggcaacagagcaagactccatctcaaaaaaaaaaagaaagaaattttgagttctaatattactccttcactccacttccatgtttttaattaggttctggccattttacctagaaacaccactgctcctcacactagacacttttaacactggtagtttcattgtcttcctctaagctctttcttctggctgtccaaatttcttcggtaccattattctcctggtgatacaagttcaaaaatcaggaggctgggtggctgaaaaacatgatcaaagaccctgatcattcctgtctctctgttcactcatcttcatcttcaggccagctgccctcttggttacaaaatggctgccagagatctaggcatcaccctagatactccaatgttcagatgaagcagacagtagtttctcttgtatgtgtaatatgaataaagaaatatttccctaaagtccttcagcagacgtctcacatctcattggccaaaacatgctcattttaaaaacaatcagtcactggtaaggagtatagggttgtcatgattggcttagattaatcaagatatggccctgagccagggatagtgtcatcttccctgatgtgtagatacccaaataaaactggagttcttctaacaagaaaaaaggggaaaatcaaaagaagtaagatatatgattctggtttccttctaccatcttagtccaaaccccggactagcgtctcaaggacagctgtgatagtttaccaactggtctccccacattttttccatcacaattttgttggatttatcttccagaaacactgcttttccacttagcccttttgtttaaaaatgccattggttctctctaaccttcagaaaaacattcaaacataccatagaatgtttaaaccatagaatataagagttagaaggcccagcgagctttgaatgtcaaaactagcaccaagagctagactagaaaacatggacgtgtggtcttagctaaacacctcttttgcttaaccaaaggaacagtatacagaaatctccctaaaagaacaatcttcaagctaagttaagtaactttctaaggaggtgtatcagtacagattcttaagagaatcaattttggcttgttctctctgaaggctagccttaagtttcatacaaattcttttttttttttagatggaatctctctctgtcacccaagatggagtgcagtggtatgatcacggctcactgcaacctccgcctcccaggttcaagtgattcttcttccccagcttcccaagtagctgggactacaggcacgcaccaccatgcctggctaatttttgtatgtttagtagagatggggtttcaccatattggccaggctggtctcgaactccggacctcgtgatccgcctgcctcggcctcccaaagttctgagattacaggcatgagccaccatgcctgggcctacaatttttacgtgtgtgtgtgtgagagagaaagagatagagaaagacagacagagagagagagagagacagagacagagagagagagacagtgtcttgctctgtcacccaggctcaagtgcagtggcatgatcatggctcactgctgccttggcttcctcagctcaagcaatccttccacctcagcctccccagtagctgggactacaggcctgcgcctaccatgcccagctaatttttttttttttgtagagacgaggtcttactatgttgcctaggccggtcttctactatgttgcctaggcttaagcaatattctcacctcagccttccaaagtgcgctgggattataaacatgagccatcatatccagccaaattctttattttcaccttccattgcaaaacagcctatcttctccttacctgtcttgactcttaccttggtacctccaaaatcttgagacctctggggaataggggagggggaaacaaagggaccatttgaagtattggctcctcccatccctggcctctctggttattgtcaaagaatgcataactctggagagagagacccatgacagcaaagtaaagaacacttcaaatgctaaaaatggagtctgctttttgttttcacttattttcaaaacaaaattctcaaaacctaggaggggccattagctggaaaaaatgtctctgagcagcagatgcagtgccagatactgatgctgattcagggctgagtgatgcatccataccaagcacataccaaattttcacatgcctttccgagtgtcattcaccttttgtagaatgcagtgtgaatgatccctctaaaattgggggtaacataaaaatagttttaaatttaaatggaatgttttctgaggttactacattctctactacacaagatagaattcatggattaaaaattcacctgatttttttacataacgtacacatcattgaataaagtaattaaaacctacttctatgaaattacgtcattgaatatttttccagtgatagtcaattctcaacttatttcttcttttaactgatttttaatttttattttttttaaaaaacagagacagggtctcactatattgcccagactggcctcaaactcctgggctcaagtaatcatcctacctcagcctcccaaagtgctgggattacaggcgtgagccactgtacctggcctatttcttcttttaaaacatttatttttactcctattaacacaaagtaacattatatgccagctgccagacttcatttttagcaattcatactttttctttttcattaagtagataggaaaagttaacaataaaagttctaaaaacagctggatgtggtagcatgcgcctgtagtcccagctcctcagaggctgaggcgggaggatcgcttgagcccaggagtccaaggctggaatgagctgtgatggtatcactgtactccagtttgggtgaccaagtgagaccctatttcttaaaaaaaaaaaaaaaaaggaaaaaacttcttccattaccatccatcctcttatatatctttttatagaaagattttttatataaacatttataaaaataaaaagtaggcataaaattagtactctaagttgagatacatgaactaattgaaaatagtcccattcatcttattaagaactatatctctaataaaatgtttctttttaagttatttatattaatttaacatgtatgtgggtcactttgatatttttacaccaataataattgtaataataataagtttttgactctttagaggcttggccatggtagaaactattacctggctcccacaatttgttccaccctccttcgggtacgtaggtagcctacttttccccatcatccttgctgtaacatgtagtcatgtaattgttctggcaacaacttgtgagtggaaatcatgtatgtcacttccaggcctggtcccatgaaatatcttctgtgcttttctttgctttttctccttctaccagctacacgaattgagaatgaggctctaggaaagcggttggcgaactttggtaaaaagccagacagtaactattttgggctttgcggccacataaagcctctgatgcacattctactggttgtttttttgtttgtttgtttgtttgttttttgtttttttgtagccttttaaagatgtaaatctattcttagctcccagagcacacaaaaataggcccacaagctaaaccctttttctaggagacagggaagccataagatgaaaggaattaggttcccctcatcactatgtggtggggagcactttgcttacctggggacctcacccaggactattctgtgagaaagaaataggctttgattgtgttgagcagttacatgctggacctatttgttattacaaatcagcttcataataacacaggaaataaaaaaattacaaacatttttaatgcagagaagtataatataaaaaatgaataataagacctttaagcataataatatagtacattaagataaatatgtagaagtagaataaaaataggagcttagggaaaaaacatctgactgttaaaaaagagctcatttgtagacttttaaaatggatgtggtgggcatcaaatcgcttggatttagattcaattggatatttcaaagcaaattgcaatagtttattttaaaatatctatattaataacatcatgaaaattacaacctttgcaattattcaaacatacgatgtaatattttagatgtcaactgaaaattttgtgaaggagtacatggttttaaaacattctgttaggggatatgccagcagaaacttttgaagaggcttcaaagaacccttatagactcagaaccaaacctcttttgaaagcttcgtagattccctgggctgaatgtacaagcaggggtttttctggtttgcctctgctcttttcgaaatcctgtgtctaggtcaccttagacagtgttcatacacaggaatgtccttgcttgtcaggagtcctgccagcggtgttgagaggccaggtgtagacccgtttcttctgaccttagattccccagtggatcatgaggatgaagctgttttctttcttcctttcaaaagtgttcccttcttggtggttctgaggattcatgagttaaatatttgttaagtttttgcaatatttggctgaaagtacgaagtcttatttattattgctggatggatgaaaggtattatacaagtgcaaagtatcatttcttcccaggacagacggcgttgtcatgcttaatccccaggcagctcatgaccccattctcttgcacggcctcctcatttacataaccagccacaaactgagttgaaaggactcctgcaagaggatttgcactttctccttttcttcagaatgtgtatctgcctaagcagtgtgataacttttttcccagactggatcgatattccttagctggtcctgttgcagcaggagtccggtgactggagagaggaagctcttgggcagtgagtaaaaaaagagaattgacttcttttttttatctgtttctgtctactcatcaggccctggacaagtcacttcacctcttgcctcattttcttttcttttcttttctttttttttttttttgagacggagtctcgctctgtcgcccaggctggagtgcggtggcatgatctcggctcactgcaagctccgcctcccgggttcacgccattctcctgcctcatcctcccgagtagctgggactacaggggtccgccaccaggttggacatcagcacctgtagaggggatagcactggatatggaaaacttagagtagatagtgaaggaggaagaggataaatagcagttatggcctcaagaccaactacagcggtaggggctgtggtttgtctcattaatcgccctcttctaagattcccctgaggaggaaaggcccacagcaaccttggatgaactgcgccctgaaaaatggagaagtcagcctgtgtgatgcagtctgtacgcactgtgataaaaaccatgtgggtaaatgcttaggactttcttcaatagagtcactgtgaggacagcagtgagctgacatcttcaccagccacacctgtaaaattgcttgcactgttcacactgaaggccgtggtttcttgtctaccaagggttgagcccagctgggtgctagagctgagccattgctgcccatcgcgggacgcccctaagggtcagctgttgccttggaagcactggcctggtcggggctgagacttttcctggccagccctccttcctaccctcctccttcactattgacagacgtgcattgcaatctgaatactctcctagcttactcaccttctttctcctctttaacttttgcaggcattttccccaatacatctctgctcatctgactcttatcttggcatctgcttcctggtggatctgaactgacccataagccacgcttactagtgattttccaggtaatcatctatttttattcatttttttttcttgattggtagtttgaacatgatattaaacacatttactgtataaatatagatatcattgttggccagtttgctgtaattgaactctccagaggggtttcaggatggttttgctttttctagaaattgtagcagggaagcagaggtctacctttgtctgttttcagaagggcaagtttaccttcagagtttccctggattacttttaatgtttcctttccttttccctcccactggactctagtactggggaccttgtttgtcttctttaaacgatagaagtgcaagttcaagtgaaatgacatttctagaagaatggaaattccttatttaagtgaagcccttttgagttcagatgggtatgtgataacagaaagagaagagcactcttgttcccagactagctacccactgctgcccaggctgcagagtaatgggactggtgcaggaactcatttgggattttccttggtaagattatgtggtcacaaaggaggttcccttgtaagatgtggggttcttgtatatgtgggggtatattgtatatgtgtattgttcttgtatatgtgggggttcttgtatatgtgtataaccttgtatatgtggggttcttatttcttgttccacaaaaacaaaacccctggcagtggtgaaatagaaaagactgactaaaggtaaaaacttggactctgtacaaaggcctttggtgattttgggtaaaaaaggccaagtctctcccacgccaatggcttgtgttggaggctgtaaagttactcatttagcaaagctgaccagaaagtcaaagggaggattcattagcaaggttgaaatttaccactagattatgcttgtctttccagccaaacagaatgagacttcatggcagtctttttgtggggtgttcaaacactaatgaaaaaaaatttgaaaccaaggtgactttttggtgagtggagtgtctgagggagcttatgtggagaaatcaatgtaactattgcctcagtgttgtcagagaatttattaaaagggatcccccgttccccattggtaactacttatttttttctaagaatgggatccaacacttcaaattttagaccttgagttgtgatgtgaagcaatgaagactcagttttttgttgttttttttgagacacaatcttgctctgttgccctgcctggagtgcagtggcgccatctcggcttactgcaaccactgcctcccaggcccaagtgattctcctgcctcaacctcctaagcagctgggattacaggcgcccgccaccatgcccggctaattttttgtatttttagtagagacggggtttcaccatgtcggccaggctggtctcaaactcctgacctcaggtgatctgcccgccttagcctcccaaagtgctcagattacacgcctggccaagagtcagctcttgacagccccaaaaatctatccttagggcagatagaagagagagatttttcacatgataatgtatttaaatcaggattagacaaagaacttcatccttccttgctgaaagatacaagttgtcatatttaattggaaaaaggcagtcttttacacttatgagagaagtggatacctaaaaatctagaggcttctttccctaaaagccattaaccagtattatttttatagatttaatgccaactaaccagactctgaattattatcatctctagtgttgaactccaggctgtacaatctatacgagggataagccttgactgacactttcacagacagcagttacagaattttttaggaaggtgacaggtagatctcaagggtcttctcattcactttttctttggtatcttatcaagatgttttaattctcttttcaaatatcttcagattcttttccctctggtgaaacagatggcaggtaggaggaaatatacagaatgaactgtgaaatttctcttgtctaaaatcattcacaaaaaatgggagatgatgactcagtagaactacaacgtgcagccactgggttagtgcccatgtagtcctaacattgtttggctgttaagagcttcatgtgatacctccaagtctagaaggactcaaccagagtatcaggacagattgagacttggggcttccacgaatttggagcatagtgggatgctgggttgcctagacatcattagtaagatttttttcataatttttttttttttttttgagatggagtcttgctctgtcgcccaggctggaatgcagtggcacgatctgagctcactgcaagctccacctcctgggttcacgccattctcctgcctcagcctcccaagtagctgggactacaggtgcccaccaccacgtcctgctaattttttgtattttttagtagagacgggatttcaccatgttagccaggatgatctcaatctcctgacctcatgatccaccccccctcagcctcccaaagtgctgggattacaggcgtgagccactgcgcccggccccattagtaagatttgttttttcctataacaaaatgcatcaagttccaactaaacaatttacaaaataattttaggaatacaactcttaaaaagtagagacccaatgtttcatattaattagaaataatgattcacatcacagaaggattctttaatacacacaagcgctccaataatcagggtttgattgaattttcagtacctccaacacatttaagtttttatttatttaatgagagggaggagacaactaagcttcgatatacattttaggagcctctgtacatcgtatggccattagatgacaaaacatttgtgaaatgatactgtaagtcagtggaggaaaaatgcctttaaaaacagcctctctttccctctctttaaaggaaaagacaaaatagtgtatgctcacagaggaggaagtaattaagagtctgattctgttaggaaactacagaagaaatataatttgaaagccggagagatactggaggggttgagtcctggtgctcttgttataaatcaatggcctttggcaagacataaacttttctaaaccttggttttcttatctgtaaaatagttctagtaaggtgtatctgcccattctcacagggttactatgagattcgtgtgtgactgtacatgtgaagttgttttgtagtctgtaaaatattatataaatatgatttattattattgccatagttgaaatactaacagcttttaatgatcataactagattgagatgtcttcaatcatatggtcaaattaggatgtattgtgtggcagatgctgtatgagaattaatctactctcttatctaagattatctagaaatatatatttttaaagaaaatttagccatttttaagcatgtgtgaattgaactggtgcccacaggcactggctttcttatactcaggtcctctctccaccttgttttggtttggagggctctcttctccttggctccaaaccacaaattaacttttttgaccaggcatgaaaagtgtcctaacttgtgtctggacaatgctgagacagagagataatagtagagcccatatatacttgactcttgtcaccaagaaaaataagacaaggaagagcagtggcttgaacagctagtgtaaccagatctgtgacttatttgggtaaagggaggagttgagtgaaattgtcaaacaataaatgttttaatcaggtggcaaactcttccaagctcagcttgaaagatcacttctgcccttgaacacaatggatattaaaaaaatatgtaccgtatttgttgaatggatggataatattgagcaccttgaaattccccccaccccaaacactgctaattagttctctcatcacacccaaaataatactaataatatggtttgtacttctgagagtgatgattcagtgttatcatgttacacatatatacagatataagcacacaaagagaaatatttatctttttatttctacatagtttttaatataattttagcatctttttattcatttttccatgtttttgaacaaagttataatgatagtattcacagatctttgtttcgtaatttttctcattaaaattataaaaattcttaaaaacatttttcaggttgtcacattgtcttcataaacactttcaaataactatcagaatcttcattgcatatgttaagctgttagatatacttaaccattctcttcttaaatatttaggaaatttctgagccgggcgcagtaactcatgcctgtaatcccagcactttgggaggctgaggcgggcagatcatgaggtcaggagatcgagaacatcctggccaaaatggtgaaacccccatctctaccaaaaatacaaaaattaactgggcatgatggtgggctcctgtaatcccagctacttgggaggctgaggcaggagaatggcttgaacccgggaggcggagtttgcagtgagccaagatgacgccactgcactccagcctggtgacagagcaagactctgtctcaaaaaaaaaaaaaaaaagaaagaaaggaaatttctaatttcccgttattatagatcatggtgcaatgagcaactctgcaatatgccctgatcattaacttctaaaccatactgtatattgttgagccttttcaaaagtgtatttttattttctaggaaaatatctattacttaatatttcccatttaaaaatatttcctccagtcccttgccccaaaatgatagcaaaaatactaaaggataaataacttacataaggtactgaagttaagattaaatatcaaaaattccttttttctctagcccaaatgcattactaaagcaacagataacatcagacaaaagatagtgccttctggccgggcgcggtggttcactcctataatcccagcactttgagaagccaaggtgggtggatcacacctgagatcaggagttcgagaccagcctgaccaacatagagaaaccccatctctactaaaatacaaaatcagccaggcatgatggcgcatgcctgtaatcccagctactcgggaggctgaggcaggagaatcgtttgaacccgggaggtggaggttgcggtgagccgagatggcgccattgcactacagcctgggcaacaggagcgaaactccgtctcaaaaaaaaaaaaaaaagatagtgccttccatcatcattatcatcaaaattatcttccttatcatcatgccagtgatgcatttattaagaacaccaaagtgaaacacggcaacaaaagagtaaatgcaaaaatgagtggcagcaccaattattttttatttaggtatttgcatatttgctatatgctggacactgtgttaaacacttgggatatggtaaattctgaaaacacaagtatcacgtttgatttgtcaaggaactggtcaactcttatcctcatgttgaaccttattcaatagttttctggactcttcattattcaaacctttatctattcaaggtccttgtctgttttgctcctcttcagttgctaatggtgacccaaccctggctctgggaattttctccatactggttcagcaagtcagggcaggttctgccccaagggcttctgggaccacagtcctctaacttagccaccccaccaagtttctaaccatacacctttgctgaaatcagtcattcagaccaagtcagcaacccggaggtagggctgagaagcagctgaagctttcctgaggcaaaaatggcagatgaatagcaggggcaaaatccactgggttaggcatgtacagaacactcctgcatggagaacactttgttaggcatgggagaaacaaaaagaaagtgaagttctcttagacttgttctcagagagcttgcaatcttgttaaagagttgagtccagaagtagctgaaatcgtagtgaatggtgagaaattatctaacaaactgcacagtacactaatgggtgctgaaagaggaatgggcaaaatcatctaaaggtcactatgctctcaacaaggaattgtggccttcttaggagcggtttcataagaaaatttttttttaagatggagtctcgctctgttgcacaggctggagtgcaatggcatgatctcggctcactgcagcctccgcctcctgggttcaagcaattctcctgcctcagcctcccgagtagctgggattacaggcacgcgccaccacgcatggctaatttttgtatttttagtagaaacggggtttcaccatgttggccaggcttgtctcaaactcctgacctcaggtgatctgcctgccttggcctcccaaagtgctaggattacagacgtgagccactgcgcctgacctcataaagaaatttaagctgcttctagccctgcagctatttacagtccagttggggaggcaagagatttctgaggcgaattttacaatacaatatatgccgggcctggtggctcacatctgtaatcccagcactttgggaggctgaggtgggtggatcacctgagatcagcctggccaacatggtgaaaccccatctctactaaaaatacaaaaattagctggcgtgatggcgggcacctgtaatcccagctacttgagaggctaagacaggagaatcgcttgaacccgggaggcggatgttgcagtgagctgagattgcgccattgcactccagcctgggtgacagagtaagactctgtctgaaaaaacaagacaaaacaatgtaaggcagtgttatgtttgattacatgtggaaagagtgaaaaagacaagaacaaggagaatttaggaagaagggagagattactgaacgcctggcaatggagtttggaggacaattttgagcagaattcaaatagcaaagttcaggtaggtgtattaacgaattaggccaaatatgcttgggtcagagcctggctgaagtgggagaaagatactttattactggatcatgtaagaaccagggtcagaaagctatgaagatggcagtgtgttgggaaacctttagtgccagattgatagctttgactcatatacttgtgaacagttgttaaaaaaaacttctgagctgggtaatgacatcataaaagaaggagaccagaaaacagagactggaggcagagaaaccagttaggagaccacttcaagcattttgagataaggtcctgtcgtgagagtgggaagggaagcatggattttgggggacactagaagaaagaatcaatagcatttgccgctgattggatgtgaacagagggaagagaaagggatgactcaggagaagcttcagtaggaagtgtgttgtggggaggatttagaagcaggcatggactttgttggaaagtgtttgcaaatggaaagatttacatatctatcagcaggagtgtgctctcaactgattatcttataaaagctgtggagtttctttatgagatagtcagacaaaaagtatcacacgatttaaaatggcaataccagggagcaactcctggctcacacaggatgcagtctggagaatgcactctgctctagagttacaaccctgggctgaatctcagggttttttgtttttttttaacatggtttcattgtatatatttggacaaaatactttctaactcatcgatccagtttccttatctttaggtctccatgaaacaaaacagccatatttgttgagtgctttattatgttaagcaggctttgtgttaagagctttatttggccgggcgaggtggctcacgcctgtaatcccagcactttgggaggtggaggcgggtggatcacaaggtcaggagttcaagaccagcctggcccaaatggtgaaaccccgtctctactaaatatacaaaaattagccaggtgtggtggtgggtgcctgtaatcccagctactcaggaggctgaggcaggagaatcgcttgaacccgggaggtggaggttgtggtgagctgatattgtgccactgcactccagcctaggtgacagagtaagactccgtctcaaaaaaaaaaaaaaaaactttatttgtggccgggcatggtggctcaagcctataatcctagcactttgggaggccaaggtgggcggatcacttgagaccaggagttcaagatcagcctggccaacatgatgaaatcctgcctctactaaaaaaatacaaaaattagccaggcgtggtggtgcacgtctgtagtcccaactactcgggaggctgaggcacaagaatcacttgaacctgggaggtgaagggtgcagtgagctgagatcaagccattgcactctagcctgggcaacaaagtgaaaccctgtctgagaaaaaaaaaaagactttatttgcaactttttattcttagaatgcacattctacatttaaaaaacatttcaatattttgtggcttaaagcaatatccattttatttgctcacaattctgcaatctgggctgggcttggctgtgcagctctgctggtcttactggtggtcactgatgtgtttgcagtcagccggtggggttggctgaggctgggctcagctcaggtgctgggcagctggacttttccctctctccaagtatctcagggcctttccttctccatgtggtttatccaacagggtaactggacttcttacttagtggctcaggtctcctaaaagtacaaagtggaagcttccataccttcctaggggatgggatgggaaaggcagggaagtggcacaacttcactgccacattttcctggttaaggcaaatcactggcccagtccagattaagtggaaggggctacgtaaaggtataaataacatgaggctgggccattgaaaggcagcaacgcagcagagagactaccacaatattatttccaatttgtaaatgagtaaactgtgacttaggaatgctaagctacttgcataatgtagcagatagagccagcttcaaatattgtgttctaaatcaaatatcaacaaataaaatgtgtatgtgttttcacctagaatcctgtggggtgggtactgttattgtccctaatttacaaaggaggaaacccaagaatagagagcttaaatgtcttgtctgaagtgactcagctgttttgttccagaaattatacacttatccactgtgctgcctcttacgggcagtacctgatacatacaagacatctgtaaatgttatttaatctgaagctgttgttggaatggctgggacaacagcaaatcttttgaattattcactattacatcttatatgctatttgggaactgggagtttttcagttatcctgtgttaagggcaatttccgtttcatacatctactttatctgttgcactatctatttcttgaagcttggaaagaaacgaagactgcatccttgcccatccagttccaacccagattctcactgcccatctaattccaaccctgattctcacctttcttcgggagtgaggactttcctagagtagggctggcctcaagttttcatcttttaatcatcaagtcagccttgtgacttctgaattagtatcattaggttccagtcacttcctcttgttcgatagcttatttcccctgttgttgcaactgtgatggcttctgagagtagcttgcaaagattctactttccaaggagtgacctgtgctagtttcccctttccttttgccagtcctatgggcagaggacttgctgcacagaatcccagctactcgggaggctgaggcaggataattgcttgaaccagggaggcagaggttgcagtgagccgcgatcatgccactgcactccatcctgggcaatagagtgagactccatctcaaaaaaaaaaaaaaaaggatgatacgtgtatgcctgccttagtctaagatggccctaatttcttccagtctatgaggagtctggaattggagccacctccaagtacagataacaggggaagtggctcactttggtggttctgttttggatatggatgcagccattcagggagtggccccaaaattctaccttttccgaggcaaaactatgagtggccttgtcttttccttaaacttttctcctccaaggcagctccagattttaacttcgactttattttaccctgtaaaaatattaaggcaggctgggcgcggtggctcatgcctgtaatcccagcactttgggagcctgaggcgggcggatcacctgaagtcaggatttgagaccagcctggccaacatggtgaaaccccatttttgcttttaaaaaatacaaaaattagctgggcgtggtggcaggcgtcttaatcctagctacttgggaggcagaggcaggagaatcgtttgaacccgggaggcggaggttgcagtgagctgagatggagctattgcactcaagcctgggggacaagagggagacgtcactcaaaaaaaaaaaaaaaaaaattaaggcacaatacgtgaacttgaagaacatacagttctcttttatttaacaaacacttacgtaaccagcccggtgctgtgcgaagtgctttacattgtctcgtttgatttacttaataaactcctatttgaatcaaatggggtggagtaggggcttcctggaatttggcttacctcgccatctccccccaccctttcccctcagtggagaggcaaccagagagaaaagaaattgagctgctctgaagggcaaggcctcctcctacttcccgcagctgtttcgccagacttgaccttcttcccttagctagaggcagggggtctccatccctcgcccagatctagttggtgggaaggtgggtggcttttttcgggtcactggcgcaccctctctacttccagccacctgctcgggttccatcccggctccaggctccccggagggcggcagggacattccaatcctcccacaaccctcacggatgttgcgggggaggggggtgcaattgctcttctcttccaacacccagctttttcttctcaatctctagtggcctgagtcacccccgtagaggaaattaaggattgatgaatggtttgaaagttgtttgtttacaacccacccgttggcgaagccgcatctccagtgacagaggcactttctgggcaccgtctgtgctctagcagacaattgagagccaggcagccaagatgcctcctcgccagaccaaatatggtcacaagagctaagcagcctctcgtggaaaagctggccttgttggtgtctccccgcgccggggcgcacccgggccggccttcgggcagaatcgcgggtcagtgcggcgctccgggtgctgcaggcctcggcgcctggctgcaggggagggcgcggtgtccaggaccggcccttcctaggcctgagcccctcatccgcgtgccctccgccacccccggccttggtttcggtccacaaccccttgatgaaacaggctcaggccactttccctttgatcccgccccaagtccgtggtaaactcaaaggaatgcagatgcaggtctgagcgggagaggtccgcgcggccgggaggagtgggtggggggcacccgtctcctcttacccagtaaagtacccatcacgcccagggttttctggagccgaggtgggaggaggaggaggaggaagaggaggggcgagcgggggctggccggctagggactaggaggtcatacataattcaacagctcaactttcgggcccgcctctttcctgggggtgggagtttgctccaaactttgtttatgggacagtccgggagctgctgcggccgcgctgtctgcttctcctgcgcctccttttcgcccagcactagcgccttaggccagctcgggggatgtgagagccgaagcccttagactgccaggcacagagtcgggtcgggatttgtcagccaagcctcggctccagctccgcaatctcgggactcacccgagcgacccaggcccgacggcaagttcgggcgggacggcggccgccgcgcgctcaggctcagcttcgctgcccgcccaggtagtgcccgctggagctcgcgcgctcatccggcaccactccagggctccaggctcctcgggcttccggagtcgagacgtggtggagttggctcgggctgaacttctttcggggggctgcctgtcctggaatcgtgcgacctttcctttgccatcctgcggttcagcaagccccgagtgcagttattccctccacccctcgccctatcttctcctcctccaggcaacttctttgcttcaagaaagttgcataattctcgaggccaggagggacccctcccccatcctgctggtcttaccgctgagtgtctgggatctccaggcgggcaattatctgtctcctcgtttccttttccctctattctttctcccaccatctcgccctctcaccctgtaaccctcttacccacttcctccgactttaaataaaaggctgatctgaccttctttttgcagaagatgaatccggcctcggcgccccctccgctcccgccgcctgggcagcaagtgatccacgtcacgcaggacctagacacagacctcgaagccctcttcaactctgtcatgaatccgaagcctagctcgtggcggaagaagatcctgccggagtctttctttaaggagcctgattcgggctcgcactcgcgccagtccagcaccgactcgtcgggcggccacccggggcctcgactggctgggggtgcccagcatgtccgctcgcactcgtcgcccgcgtccctgcagctgggcaccggcgcgggtgctgcgggtagccccgcgcagcagcacgcgcacctccgccagcagtcctacgacgtgaccgacgagctgccactgcccccgggctgggagatgaccttcacggccactggccagaggtacttcctcaagtaagtcagcctggagccgaagaaggcaccaagtcacagtgcccaacgcgcgcgtgtgttcgtgtgtgtgtgtgtgtgtgtgtgagagagagagagagagagagagagagaaagagagagatggtgcgtgtccttccacggttatttcacagatatggagagctggaagcagggagtgagtctctgagtgttggaattgtaagggatcagaagcagggatcagaagcagtggtgaagttcatccaccataaaacacacaggtgactttgccttgaatctgcaggactgaagccaactcttgggcacagacccttagtcccttccttggccactctaagtcagatagtccagagccaggccctttgggatgtgacaccgagataaatcagagaaaagctgtgaagcttggggaacagagggacttttggtgaagtaggtggtctgcagtttctatcttcttgggaaaagcaagctggaaaagtgaacagtggttggtaggccatagtgctcccagctgggtgacataatgaccacacagcacagtgatgttattagcaactgtgtggtggagtagttgtgggctggacaaatcaatcgtgtggaaattgttaggagttttattacattaaacttgttaacctaaaataccatcaaatcacaagcctgctttgtcactcttcttcctttcacattgttccagctttttgatgtcatgaattttacattagttgaaattttcaaattacaccccacaggaaaatatattctcaaacactagaggaggttgtttcaattgtggtaccctaagataactacattcctcaggagaaaccaggctggaacttgaaatgttccattgaggtcatagggtcaggctatcaaagatggaggttgtgccagcctaaccacttgtttcaggattgcctgcactgccagtgagggaaactcctctcctaagaacttgacttagacttcattttaaagcccatatttctttagtagagtagccttagtgcaaaagtgaagacactatgtacaattttaaaagtttaatcaagcctttctttggcactaatatttgatgctctgattgctatgagagagccctaagaatgaatacacagtgatggatgaagtttactatagtgagcccattgattcataccagtgaccaattcttattacttccccatctcaaggctgttgatatcttgtccaaggagttcttttgttgtttctgagattggtgtaatgctgagattctgaaacagacttgatggtcatttatgccacagctggtcttctctgggttattgagtgatagtttggacatgtgctcagtcctttgacttctaagtagctggtggagtcaagaatatgatgtaataacatgacttttgttgttgttgtttgttgtttgtttttgtttttgagacaaagtctcactctgtcgcccacgctggagtgcagtggcacaatctcggctcactgcaacctccgccccctgggttcaagcaattcttctgcctcagcctcctgagtagctgggattacaggcacccaccaccacgcctggctaatttttgtatttttagtagagacgaggtttcaccatgttggccaggctggtcttgaactcctgacctcaagtgatctgcctgcctcggcctcctaaagtgctgggattacaggcttgagccaccatgcccagccctacatgatttctttctttctttctttctttcttttttagatggagtctcgctctgtcgcccaggctggagtgcagtggcgcgatctaggctcactgcaagctccgcctaccgggttcacgccattctcctgcctcagcctcccgagtagctgggactacaggcacccgccaccaagcccggctacttttttgtattttttttagtagagacggggtttcaacatgttagccaggatggtctctatctcctgacctcgtgatctgcccgcctcggcctcccaaagtgctggaattacaggtgtgagccaccacgcctggccccagccctacatgatttctaaactgtgtttatgaatatatacacacatacgtatggtatatgatcagtataactgtgattattaaaaatatgaaataggagctaggcttgcctaatatctgaggaaaactagacgaaaaagaccctgaaacaaaagcaaaacaaaaaaattcctttatacattgtgttttgaatgattggagtagctcagaactgcctgtgaacaagggcaaaagtggaagttagccttggatttagagaaagttgctgtgatctctctgcccatccccccaaccacaaccactctccaatccaaagcagagtgcatcttcatttcactttgggtagtcaatgaaaatgacagctgaaaaaaatgtgtaagtagtaggctggcctgctctgatgctatccctggaagtattttggccaagtgactaagagaggttaagaatttgtcagtgactattgtctttaaggataagcaatctgccaagagttctctgaatttcttgtagagttttgtttaaagttggaattaggtaaatgtcatacactttgttacacagcctcaaaaggcagtgtatttcagtggattaagtagaagcttgaaaaatgatggtgactcacttggagttacttttcattatgtctgtttattactttacttgccatctatgaaatagggctgaggctagcagatacatttttttttttaatttttttatttttggctggggtagagatggggtttcactatgttgcctaggctagtctcaaactcctgtactcaagtgattctcctgccttggcctcccaaagtgcttggattacaggcatgagctaccatgcccagccagaagaagaatctttttcttgactctgttgggagttgagagctttataagttggaaatcaaaggattttagaatgacaagggtcaattttgtttagtttagtttttgactagaaaattgaggccacggaagggtgatgataggaatttgggaaagtcatgtggttatttaatggtggaccctggactggacctctaatctgttgctgtctacttaggcaacagttttcctttttccccaccgacacctttcccccatgtcacttccttagctaaacaatgaacttaatgggaaacagagcctggacatctaagaagctttaaaaaagccttttgtcattttctcaggtaagattattcctaggtatatgatgtaatcactttctgcaacctcctgaaggcacctttcctgagcattcacagctttcctgtggtgttcaggtgtcctgtggtattcagatattcctttagagtaacaatgactagggcatggtggtgcccacctgcagccactaccacccccaccccatctctaaataaaaagtttttaaaaattagagtaacagtgaagcagattgaatgttaaaacacctagcctctgaaaaccactgtgttcattcattattcctgctgtcctctcaatctcatgaatcaggctggggtgttgggcaacctggcacactgactgaatactgatcacattaaatttttaaaaggtctctgattataaatagaatacatgctttctatacataaaccagaaaatggggaattataaagaagaaagttatctagcttcagtagaatttcccatctttactctttcgcaaacattcttgtaaaaatctttcatttgagtaacgtgattttataagaaaaaagattttatcctcctcttaaatacaattcagactataacatttggctgccacgtctcatttttagtgacaattttagtgttttgccttttctcaaatgtgtgacagaaaattatttttgtccaagtgatccatgcacttggtaacaaatccaatatacaggaggacatttgttgaaaaacaatggtttccttcacctcctcaaggctcacagagggcaacttttaatttttttcaactgtacccatatttaattcttagattgttaccttcttaagcttaagtaatgtgcttttaccaccatgttttgatttatcaacttttagcacctgatatgaaagtgagaatgtagctctttaagctagttttcttttttctctcccaggtttgatgtttataatattttaaatttgtctgttaggtcaccttttttaaataatcatctttttttttttttttttttttttttttttttttttttttttttttttgagatggggtctgtctctgtcacccaggctagagtgcagtgggaatcatagctcactgaagcctcaaattcctgggctcaagtgatcctcccacctcagcttcctgagtaactacgactataggtttgcaccaccatatttggctaatttatttaacttttttgtagagacagggtttcctatgctgcccaggctggtctcaaactcctggcctcaagcaatcctcccaccggcttcctaaagcactaggattacaggtgtgagccaccacacctggctttttcaactttggatagtatttcttgattccttatgctgtatgtcagtaatgtttggattgctaccagttctactgttcactttttgacaatgttgctttccacattgccaaagccctgaacccataacctgtatttgtgctttgccccaaagttgaccatcttattcgtatatgattcttaaagttgaaaatccataaggccgggcgcagtggctcatgcctgtaatcccagcactttgggaggccgaggcgggcggatcacgaggtcaggagatggagatcatcctggctaacaccgtgaaaccccgtctctactaaaaaatacaaaaaaaaaaaaaaaaaaaaaaattagccgggcgtggcagcgggcgcctgtagtcctactcaggaggctgaggcaggagaatggtgtgaaccccggaggcggagcttgcagtgagccgagatcgcgccactgcactccagcctgggcaacagagccagactccatctcaaaaaaaaaaaaaaaaaagaaaatccataggcaacatttacatgactacaattctgtgaaatgattcattgccttgtgtgtcaggattggattttagacttgcactgtgggtctggttttaggattcctgggccaatcaaaggatgagatatctagccccaaagtcaaatgggattttttgttttctcactcttcatcagttgtttaaatttgtgttaccttttagttttttcatatttggaccatgactttcttaaattttttccctagtatttctgattgccttttaatgtgttcatgcattatttgccattattatgatctcaaaagttttctaggctctcaatcttgtctaacctatcgagtcttctttgtctaagctgtatgccgagattcctttctcgttctgtgccgttctgaactggttattcactaagcccactacagagctgtcatcctggaacttctttccatggctggaagtgctgtttccttttcccgtgtcttcctatttttttggtttatccctcattttgctgcagtacatgcttgagtaacttcttaagaagtggtttgtaggaggtaagtttttcaagtccttttttatctgaacgtatttacttaaaaattgttctgactctggcttgttttttctgtttatctttgaatgacagtataatgtagctgttttcataagggccctttgtcattcaaaaaatactgtctgctaactcagttgtctgtaatgtgaagagagtgatacctgttgcattgtggtttgaaagatgagcatatttaaagcatctggcgcacaggagatgttcagtacaagttagttcttgctttctcttctctctctcccaacacacatagcctatttacccagccaaaatcagaagcagaaaccttggcaataggggtcaggtgatttttgactctggattacagctgtagctttgagggacaacctggatctggagttgaaagtcagttttaagtttaaaataaggagttagagtcaactttcctggttaagagaaacctaaataggaatgctcactgtaagtgcccttttgcttcagcattttgggcagaggatacccaactccatctgagaagtgtctagtttttattgtttggaatctagattgtcactacaaattgagctgtttttgtgtgtgggataggggaggaagaggaaatggagaagggggagatgagcaggaaaggtaattgacatttgttgattacctgctgtatgccagacaaggcagagagtgagagtcagcacatcccagagagatagcaacagaattatatgcatatggaactttttcataaccctagatgcttttacgtatattatttcttttaaccctcacagtgatcccatgaacaggtatatattattacctcattttactgttaagtaaactgaggctcagtgaggttaaataaatgtcctggggtcatataacaggtgagtggcagagatgggattagaactctgtgattccaaaacctgtgttcctgtccttatgccatgctgtctcatgccaattgtgtggcccataattaggtcttgtaattatgtatccttgatgatcgcataactgtggtggtggagtggtggatggatttttagagtttgcttctgaactgagtctgggttatgctatttggaactgtcattgatggtgagatagagatgatggaagaaaacccaaatataccagaaatgggtagtacacctccattgtctatttatattttattctcatcaagatttccaccaaggtgactcacaccactaatcttatcactttggggggccgaggtgggaggattgcttgaggccaagagtttgagacaagcctgggcaacatagcgagattctgtctctacagaatttttttttttttttttttttgagatagcgtttcactcttgtcgcctaggctggagtgcaatggcgccatctcagctcacggcagcctcctgctcccaggttcagctgattctcctgcctcagcctcccgactagctgggattataggcatctgccacctcgcctggctaatttttgtatttttaatagagacagagtttcaccatgttggccaggctggtctcaaactcctgacctcaggtgatctgcccaccatggcatcccaaagtgttgggattacaggcgtgagccactgcacccggcggtcatatggatttctttcagcttattctttacttgcatgctctctttcctggacttctagcttttatttaatgttccgtctaggcatagcagaaaataaataagaaaggaaaagatgatgttcacttgctcagtgctattaggagaagaagtgaaatgaagaaacatttataaagtgctgagcgcagtgcctggcacaaacaccacctttgcaagttcattcctgttattgttcgggatttagacggtgaaaggggcgatgatcttccagggccttgcctttgtgccatctaaaagatctttagccagttcagctaatttacaactagaaatcatttgaacttggctgggcgcggtggctcacgcctgtaatcccagcactttgggaggctgaggcaggcagatcacctgaggtcaggagttcgaaaccagcctgaccaacatggagaaaccctgtctctattaaaaatacaaaattagccgggcatggtggcgcttgcctgtaattccagctactcaggaggccgaggcaggagaatcgcttgaatccgggaggcagaggttgcagtgagccgagatcatgccattgcactccagactgggcaacaagagcaaaactctgcctcaaaaaaataaaaaataaaaaaaattaaaaaaaagcattgaactcctgtttgtgttagcatcgtgagtatgtcctaaaagaagaaatgtgtggctggctttatcaccgcaggcagctgacagaatctggagagagaaggggaacacagacaaaccaggccaaagagctggtttcgacctgtggtcctagagcctggatcagctgccttccaccttggtttgccggaagcctttgtaaggtgtgtcctaagtcagtcatttataatatgactaaaggtctgaaatttgcagctgtacagaatgtctgtcagtttctcccattggctgtactccttctggcctcaggaacttggcacaagctgtttcctttgcctggaacattatttccctgctttttgcctgcttaactcctccattaccttcagatatcagcttagatgccacatcctgcaggaacttttccccaacttgcagctcccactctggattagatgctgctgctcctcctcccataggcccttctgtttcctcagtcattgctccactctcatattactgttttttttttgttttgtttagttttggttttcctttttttactgcactgtaacctccatcaggggaagaacgatgtttgtcttgcttggcattgcttaacttgagcacagtgcctggcacatagtaggtgttcgaaaggaatcctgtattatttatttttagccattttcattgtaaacttgcaccctggaattcgtaggagtcttccatgcttggaaatggcattccattgtatctgtgcccctttgactgcaagattaatgtcagagctccagatactaaatgcagtggagagggagatgaatgaaggctgggtgttcagagaagtctcataaaggtgcttagacataaatggaaccttcaaaaagtggcaaagatataggtaggtgtgcagacaagccttccaggaaaaacaggatgggaagagaggtatagaggcagaaatgctgagggtgtgtttttgagactaagaggagcttgtactgacttgtattaaaagataggtgttggttggtagatgattatgcatcccattgaggttctggagcctcagctagggtgggctcattgaccttttgctagtaaatgtcaactttctcactccttagttttgagatacacgagtcctagctttttgtgactgtagcgtaagaccccaccattgtcacctatgttgagatcttcctggttgtttagagaactaagcattttatgctgacttaaaagagtctggaaattatggtctttttatctttccattcatagctccatcctatattcaatttagcaagtacagttccaaaattgtgggtggtctttacttcccaagtaagtgggataccaggctacccttgacttgggaccgcccctgctggatctatcatttctgcttgtaaatgaatagcttttgagtctgcttgttcccagaatactctcttgtggttttcggtactttctcagttcctctgaggctgatcaactagacacagacaaaactgagattctggaaccatagtcatcccaccagggcccacctaggcccagttccctgaggatgccctgcctgggcagccagtggcctccctctcaggaacgcattttctaaactcgaaagttcatgttttcaggtgacttctttaaattaaaaaaaaaagtttttaaagaggtaataaatacatttaaataccaagaacctaaaataagtacaaaggcatttactgggaagagtctttctttcactctcctccagtcctcttgtccccctccccagagcactagtttttttgttttttcagagaaactctttgtgagtacaagcatgcatgtatcaatgtagatatccacctagaccatgtcaacacaacacaatggtagtgtactgtacacactcttctgcaccttctttttttttcacttagtataatatatcttggagttcatttctcttctgtacataaacctctgttttttttaaggaccacatagtattccattgcttaggaatttaaatgtacatcatgtcccctactgatggacatttaattgtttctttctctttttaattaaaattttatatgctcaaacactgttggagggaggaaagtggaaaagaaattcttctgatcttctctgaatcccccatttagaaagtaccattgttaacactttattcagaaatattctttgcccaaagaacagctctccggttcccatctaatttgttagctagctagtcggttatctaatttatctgtcatccactgttctatctgtcaatcagtctgcttatccttcttatacaaggctgatgcatggtctaccaaattcaataaccagttagagtggatgcccaaccaataagaactgatggcatactgctgggaagtaactgattatatagcttagtgctactcaaagtatggtccatggactgatgccagtgtacagttgaattataactggcctatgaagagctagatagagaagttgagagtatttagaaactttatggcaaaatggcattgctatgacatccaagtaggtgaccaatgcaattatcttgtggaacagggtagtttgggtgtgtcactcttgtgtggtgagtcacatgtggtgtgagctatgtataagccatccaccataggactacatactggtcttgacagattggaaataaaaccccggtccttcaccacagatagtttgagaagcagtaatctgtttatctctcttaacgacctatctaatgtgtctgtcatccatctcttaatcaattcatctatttacttacctatcgttttatttttccatccatccttctagctataatttttgcatcaaccaattaatcatacctttcattaacttaataatcattctaagaggttcagtcttaaaatggaaatctatggcacaaaggttgtatataatctgttttctagtacataatatattttatgtctttgtggcttctacagtaactcattgttttaaaattttgctgtggcacatctcaattctgaacactgtacaaaaatccaatttctgttcttttttgtgactagtctgctggtaagcattgccagtgacagactcaggagtcaaaacatggtgactggagaaaaatacacatgctaggttgtttatttaaaaaaaaaatattcatttgtgatggcttttctgcagatattaaaatactgaatatctttctcctagtttgcacttgcaaagcacttcttagcctaggttttcaaaggggcacctgggcacctatcatagttgaggctgcaactgtgtgtgataacccatcagaaaggagaaaacccaagcaaatggtaaatgtgactataatgaacaaacgtaacttttactgacttcatttattttggggtttgtttttaaaaagctggcttttgttataaaaataatacatactcttaccaaaaagtccaaacagaactgaaagttataaagtgaaaagtaggggctgagcagtggctcatacctgtaatcccagcattttaggaggccaaggcaggtggatcacttgaggtcaggagtttaagagcagcctggggccaggcgtggtggctcacacctgtaatcccagcactttgggaggccgaggcgggcagatcacgaggtcaggagatcaagaccatcctggctaacacggtgaaaccccatctctactaaaaatacaaaaaattagccaggcgtggtggcgggcacctgtagtcccagtgactcgggaggccgaggcaggagaatggcgcgaacctgggaggcagagcttgtagtgagctgagatcgcgccactgcactccagcctgggcgacagatcgagactccgtctcaaaaaaaaaaaaataaataaaataaaagagcagcctggccaacatggtgaaaccccgtatctactaaaaatacaaaaattagttgggcatggtggcgtgtacctgtaatcccagttacctgggaggctgagacacgagaattgcttgaacctgggaggtggaagttggagtgagctgagatcaggccactgcattccaggctgggccacagagcaagactctgtctcaaaaaaataagtaaaaaaagaagtgaacagtaaaagtactgcccacctccctgccaccaccaccctgcaaccccaagacacacactaggtttactcctcagaagtaactactgttcccagttacttgtgttatcttccaaggatttattatgcatatatgtatatatgacttgactgataaaaacagcattagtttgtttttgcattgtgggaagtctctgttactggttgagcctcacataacctcaggaccgggtagagtacagacatggattaaattctggagaactggatgcaatgcctgatgggatgtctcagggtgaaaagccttatcggggtaaccatgatctagagactgggatttgactttttggttcaagaaagtgacgtctctgctggcccaaaactggtcaggttttcgaggactgtctgatgtgagccatactggggagaaacagggatagaaattttcattacagttccagaagcacaggtagtgactggaatattctgccactctggaatgaaggtattcataagagtgatttaattgctgaaaagttgctttagtggtgctggaaaagagaagaagtgagatcattttaatcactgaagggatattagcaggtaaatttgacaggatttggtgatggattggataaaggcagcgagtaaagcaggaggaaaggaagatttgcagattgctggctgtataatgtcagggctggtggcgcctctaattgtagcaagccgtactgggagccttggaagaagtggagaaattatttaacatattgagtttgaagtgactttaagatgcccaagggaggaaaatggggtgtagtggaatgtgtataattattcaaatcctggtgtggttgagatttcttagagaggttacagatagaatgagaagaaacaagaagtactgatggaccctgtaaagagatggagagagaagagaaagagaggtaggaggaaatccagagagtggtgcgtggaagccagggaagaaagtctttcaagaagaaagaatggttagctctgtggtgtgtttctcagaggtcaaggaagataaggactgaaaaatgtccagtgaatgacttttccacgaggacactttctttcccaggataggtcataacagggcctgaggtactaattcttatgataattcagataatttagttttgagagacagaaaaataaggaaaataaagatctcaattagataaggtgtgaatacactcccacatagtcccacaagtttccatataacctatagtgtctctcactttattgccgtataccacacgtttgcttgtttaagcatcctattaaaatggggtccgaaatcagtgttttataactaactgagctaagttataagactcgggtaaaaacatgactctaattgatatgatcattacttgctgtgaggaaaattacagtctgcaatcctagcttggtaaaatcttcgtcacaatttgtagtgcacaggactgttattgctggcacacgtcataactaaattacagccataaaaatagcagattatgtttggagagtatcagtaaaaaatttatggttccaaatattatgtaactgtagtttcagataaatgtttatctttcctatctttgtttctccattcactggaactgattttgatacctggcaaaggggactcagattaatgcaagtaagttcgccaggccagtttgccctttcacaatataaggtaaataaaacatgtttaattatatcaaactggtttgagtttggctgcattttgtagttaaagcttgtattgtagttaaaaggctattctgtattttgctaatttgggagcatttggtggccttgttacagatttgggatttgtaaagacatgtgaatttagtaggcgggattaagaatcataaaagaagcagtaaacttgagtgctgctcataaaattacttaggttttctgcagatgcattctctagtgcaaccgtccccactttttgggtctttgttttaggtattatgtgaaatataaccctatgcatatgcaacttttggcaaataaggatttcttttttttttttttttgagacggagtctcactctgtcgcccaggctggagtgcagtggcccgatctcggctcactgcaagctccgcctcccgggttccggccattctcctgcctcagcctcccgaatagctggtactacaggcgcttgcaaccacgcctggctaattttttgtatttttagtagagacggggtttcaccatgttagccaggatggtctcgatctcctgacctcgtgatccacccgcctcggcctcccaaagtgctgggattacaggcgtgagccaccgtgcccggccggatttctcttacaaaattatatcatccaacttatatttgggtattcgtactttcgtgtgtgtgtgtgtgtgtgtgtgacagagttttgcttgtcgcctaggctggagtgcattgatgcgatctcagttcaccgcaacctctgcctcctgggttcaagcaattctcctgcctcagcctcccagttagctgggattacaggcatgggccaccacgcctggctaattttgtatttttagtagagacggggtttctccctgttgatcaggctggtcttgaactcccaacctcaggtgatctgcctgcctcggcctcccaaagtgctgggattacaggtgtgagccaccacgcccggccacattcgtacattttaacataaaatccaaccataaggctatattgtagaaaagcttgaaggaaagaaggcaggaatggagaaaggatcagctacctaaaagttgagctgtagccaagggtatgtttaaaacatctcttttttacctaggcttttaaaaaagtttagctatcttatctatcatctaagaaaagttaaccttgagttattgatcttgcatgtctgcatttgaagtatgaagatgacaggggctgtgctttgggccttggaaagctgtgttctcaagcaaaggtccaagagctgtaatccgtatggtacacagtggaaacattgttctttgtatttgtctgttgctaactttttaataaactattaagtagttggtgattattaacagtaggagcagaatgtagggtcattatggacaatttggagtgtcaacattaaagaaatgattttaaaggttagatcccaattgttgagactttgcctgaaactttggcaggtaagtagagtgagggatggaccagcacaaccttttgtaattattagccgtagtgaagtgagtcaagttttgccacagtgctttttgtttaacctaacaattggccggccctagttaattgttgaaaaccattaaaggactcaaatttcccagttgcacatgcattggaatgtccagcttacctcatgtgtgtgaataaagggccagtggtgtggctaattaaagtgcattgtcctttaagcaaagcgtcagtaacaaattaagttttaagagttctcgaaaggcccttctgaggactggtaaacatcttggtggctggtacatatcgtatggagtctaggtgtgaaagctgctgaaaacaagcattataaacttccaagtaagtgtggaggtgtaaactgatgccatagagttgcttcagctgaagcgaaagatcatatttactgacacttattacaaatgggtttttaaaacaatgtctgttttgtacagtgacagtaaagtctgccaagagtaaaacaaaaagttatattgtggaacaagataaaaggaccctgcataataaataatatcgaatgccttaaaatatgaggtttcatttccaaaatataaatatgagctcctaaatgaatgtttaaataatttggtttttctttgatttgccagtgacttgatacgtaaaataattttggctctgaatatgtccagatctaggccatcacaataaagaatacatctgtatagtaaatacaaaataaagcaaccacaaatgacatcatgttttagtgatagcttaggaattgttttttttattatgatagaccaaaagtagtttattggctataaataatatatttattatctgccagtttctaagagtagcatgatatctctgatccaaactgtattgattctggtcgggctcggtggctcatgcctgtaataccagcactttgggaggccgaggtgggtggattacttgaggccaggagtttgagaccagcctggccaacatggtgaaaccctgtctctactaaaaatacaaaaattagctgggtgtggtggcacatgcttgttatcccagctactcaggaggctgaggcaggagattcactagaaccagggaggcagaggttgcagtgagccaagattggggcactgcatttcagctttgggggcagagcgaaactctgtttcaaaaaaacaaaaacaaaaccaatctatattggttctaacctttatctatagacaaaagcattggtttatgaaaaccatcagagatgcaagccatagaaactttcaaaaagttctttaagatgcaactgtctggatctgataaatagtttcaattgttttgctcttgatctggatgggttttgagcagaggagattgggtgaaattaaaggtttcttaaaattgttgacactggtagagaggcatttatctgaatacagtggggaagaccagagatgttgcttaaagagattttgtaagaaaagtaggcacaattcttgtgaaaagtgggctacgtgaataagggcaatccaagaaatcatgttagtgcccctgtgtagttgtatgacttctgtactttttctttctttctttctttctttctttcttttttttttttttttttttgagacggagtctcgctgtgtagcccaggctggagtgcagtggcacaatctcggctcactgcaagctccacctcccaggttcacaacgttctcttgcctcagcctcccaagtagctgggactacaagtgcccaccaccacgcctgggtatttttttgtattttttagtagagatgggatttcaccgtgttagccaggatggtctcgatctcctgacctcgtgatccacccacctcggcctcccaaagtgctgggattacaggcgtgagccactgcacccagccaacttctgtactttttcaaaggtgaacttttggggaggtgatttcttgagaagtggggaagataatgggataagttgtaaaagtgcccagaaatatgagtttataagagaccttgagagctacatactaatgtagctgtccattagtatgaaagaagaccagacatgttgtccaagctgtctataggaaaatagaagaggtaactttaggttgtcgtggctcacacttataatcccagaactttgggaggctgaggcaggagaatggcttgaggccaggagtttgagaccggcctgagcaacagagcaagaccccatctctataaaaaagttttaaaaattaacagaatgtggtggtgcacactgctatagtcccagctacttgggaggctgaggcaagggggatcacttcagcctatgaattcagggttgcagtgaactatgattgcaccaccgtactctggcctgggcaacagaaagagaccctgtatatatatatttttttccaagataattttagtcttagtctactctgaataacaaagaagaatgatttattcatttagaggcattttaagagcagtctttgtagaccattgctagatctttttggaatgggctgccttgaaagcagagagaatgtaaccatgtgtctttaagtggcattgtttagtggttcttcacggcagcccaaagagaaagtatctggcatcagatttgctggatgtgcagagatgccagtatctctcgtttgagctagcctctgcggtgtttttgctctcaaacctggtggtagagtgacggctttgatttgcttcctgcctgaagcctgctttggatgaatttaaaaacctgtttgtttccccatcggccggctgagccttacccataattcctgaactttgattatgggggttattacaggacaagagcttctttgtaaaagagcatgtttaatactctggggtctagcgtgactagcggatataaattgtatggaagcaattaaatgcgaaggaaatgtcatgtgggctgaatttaaacataacttgcggcattgattttttttttttaacttacactaagaaggatggagagagaaaaaagaaagagaatggaaacaggccaagcgagtcagagaagcacacgcagagacaagagaaaaggagtcatttttaacatttggttaaaagtccaaagcccagagctagcattatgtgaattatactagtattatgccattgccctttaaatgaactctttaaaaacacaaatgtcagggaagtatactgtacttggggcttgtatctctttccagttgctcctctttatcttaaggcatatatgtacatacagcagtgattttttttggaatatgttaataaacaggcctgaaggaagctccgtaaacgattaaagtgcttctttccctagttttctctccttttatgctcacggccactgcatgcctcttttcttttcttttctttctttttttgacaaagtttcgctcttgttgcccaggctggagtgcaatggtgcaatcttggcttcctgcaacctctgcctcctgggttcaagtcattctcctgcctcagcctcccaagtagctgtgattacaggcatacagcaccacgcctggctaatttttttgtatttagtagagacggggtttcaccatattggtcaggctggtcttgaactcctgacctcaggtgatccaccacctcagcctcccaaagtgctgggattacaggcgtgagccaccgtgcctggttgccactgcatatgtcatacagagtagctcatctttgcacttttgattaggagtagtgtgtcatttctcacttgcctagaatgtcctacatccctatgcttggtctattaagacttagccagccccatctcctgtctaatgccttattacaccaaccaactagaagggatctcctcctactccagatccccatagtaatttgatctattggggtaatttgccacttaatcttttctactgtccatcagagtgtcgtgtaaggtttgtttgtaaatgaatgggtttatttcatttctccaacttgccaattcttagaatatggaactggtgttgtattgtccttcatgcctagcacatattggtactagggaatatttattgagattaatgttaatactgaatatgggccgggcacggtggctcatgctgataatcccagcactttgggaggccgaggtgggtggattacctgaggttaggagttcaagaccagcctggccaacatggtgaaaccccgtctctactaaaaatacaaaaaaaaaattagctgggcatggtggcacacccctgtaatcccagctactggggaggctgaggcaggagaattgcttcagcctgggaggtagaggttgcagtgagtcgagatcatgccactgcactccagcctggccaacagagcgagactctgtctcaaaaaaaaaaaaacatactcaatatgctgttaaaataatcaaaatgtgactgggtggtcacaggcagaaattgatgcttttagattagatgtaataatatagcaagtttgatgtgaaattgagtttagaaataatagacaacctttgattatttgctgtgatagagagtacttgtcctttatttttattctatatgctatgaactcatagtgacaagaaccaaatcttacctgccttgcataatacttctctcttttttttttttttttttttttttcacttgagacagtcttgctctgtcgcccaggctggagtgcagtggcatgatcccagctcactgcaacctctgccccctgggttcaagtgattctgcctcagcctcccgagtagctggggttacaggcacctgccaccacacccagctaattttttgtgcataatacttctctaatgcctggcccaaagcatggcatgcatagtagggattcatttaacttttgctgaaagaaatataaatgatttttttcttttaaatttctacattatttagattttctggtgactctttcctatgcaataagccaatacatatttatggagcacatactgtgtgccacatactggtactgtgcttagcataaaggatacatataatgtatattttactttagaatatattctattctttgtatttaattcttagcccgactataaattctaaaaaatcagtttttcaagcaaaaacaatgaagatccaagaaaggaaaatttcctggtattaattcaatatattcatctattcccagattatttccacattccacttgatggtggaaatttactaccccctccttgcctttcaaatgatcctaagatcgtaacctttcccaatggagctgaagaggtagagtaggctgtttgggtttcaaaggacttttcaggacacaaagtaaataggggaattggagatatcaacaaaactaattaagtggattgactgtgtcagtagtgagtacagagatgtcagaaaagctagttgtagcaagtatttaaacacagcctcaagttcattttcagtggtgttgccatcatccacaaacttcaaagaaagtttagccagattaatccaggaaaattcattctcctgggaacatcacattctaaattacttattcattgttaatatcttcatttaaaattttgacttgaacttttttattctttacttgtcctttaagatcacacagacccaagatttgataaggttatcatcttttcagatctcagaaaagtgggaaaatgaattcccttttgaccagaataaagggaagaagaatttaaaattataaaccaggtttactttactcatagatggtcatatattcaacattgccttttttttattttaaaaaactgcccaagtcataaataaatgcattcttgctttaagaaattcagctaaagcaatagactttcttgaccctctatccccaatcctgctcatctccccagaaggagagcccatttctcagttcagggactgtccttcagacttatgcatgtagaaaccaatgattcaagtttttcttcttctccttcttccttcttcctcctttctccttcctcctcctccctcttccgcttcctcttctcctcctactcttcctcttcgtcctccttcctcttcttcttctccttctctttctccttctccttctccttctcctccttcttcttcttcttctccttctatatattgtaccttaacttcgtttttacccaccactttaaagtattttgttctatgacagcagctagagatcttaatacgttactccatttcatggctatacacagtttatttacccgttttcctagtaatgggactgtaatgttacttaaacctcatctcaaagacctaatataaattaaattctagcttcatttgaatctttcatcactttgaagggagatttttagtaattatcaaaagatatgagatcaaacaagtccaattactaaaaatacaatgcatttgtatgataatttaaacttcttttaaatatggagacccagagcactgtatccccagcactcctgtgagctagccaggagaagaggaacattgtcacaaccacatgaagaagagggtagagcagggcccccttctgctgatttctgattatacagggctctttggtcaagatcacagaatgtgtttctccctcccatgcaagaaaggcagggattcctcctctcctctttagtcttccatccctgctcagagctttttggctagcattgtcaattcaaggtttggcctcagagtctttgatttaagttgtgaggggacagacatggtgaggatataccgtggccgggtctggagggtgagctactgagaatcagggcagggaagaggctcagtggttgctggtgctgaggtagtgtctggaaagcacatccgtgtgaaagggcgaatgccagctgagcatggccttgggtcactggctgccttgcaaacaggagctccacaggagaggtggacttgcacaacagcagcctgacagatccagggtctttcacttgcttctttgggatcctcaccaagcatgtcattcaaccatttattgtgcatggaccttggtagggaataggcattgctctgttttctgatttatttctccttgaaagcccattctcaagggcagggaacatgttttattcttcccagaaccttaggataaataaacgggaaaaaatgagtgaaaaaggaaactttggtgggagataatgaggcttttccttactgctcttatctttagaagctgggtcacagacatcttaatatgcatttacgtgtatttatttaacaaacgtgtacctagcacttactttgtgccaggcattgttctcacactgttcacatttaattatgccaagaactctgacagaaacactatttttatccccactttgctcagaaaactgatgtacagggcatttaaggaacttgaccaaagccgcacactagtaaggacttaaacttgggcagtctgggcccagagccaccctggctctccttttccctctcaccggtcttgacatggttgggtcttcattatttttccctttctggacctctcatctttccttcctctttctccattcctgttgcctccaccctactgtgtgatgtgatcatttatttgtagactgcagcacactagcctctgacttcagtcctttgcacaccacagccaggctaatcttccttcatgatggctctcatcacccttttcctgctacagaactcttcttggtgtcctgtcctgtcagggctgatctcctgcctggttcctaaacctctagaatctgacagtgtgaccctgctcatcgagcctcacttcccttgcaacccatttgctgccacccacagctcctggcagtgcttgtaccccttccctggagcaccctcactcacctcttccctgaccctccatcagttcattctgccatggatttccttctaggtctcacctcctgcctgactacacagctcttagtgtccgctccacccctgaacccagtctacaggctgttggatttcattgttcctggcttcaaaaagcctgattaggtttaaactctttgggggtctaccattatacctagcactgagctgggtcccaaaggacattgttgagtactgggattagtaggtaggacgcttgcctaatattggactttttacttggtttcctcacccttaaatgaagaacttaaaggagataatggccaagtttccttttaatttgcttaaccaattacacttgcatatatattttattttttagagacaagttctcacttgtcacccagagtgtaatgcattggcacaatcatagctcactataacctcaaactcgtgggctcaagagatcctcccacctcagcctcctaagtagctaggactacaggtgtgcgtcaccatgcctggctggcttattttatttttgtagcgatggggtcttcctatgttgcccaggctgtccttgaactcttggcctcaagccatggtcccacctcagcctcccaaagtgctgggattacagacgtgagccactgtgcctggccatacttattttttaacagcttcattgatatataatttacacagcacataattcactcattttaagtgtgtaattcaatagtttttaatagattcaggtatgtacaaccatcatcacagtcaggtttagaacattttcatcaccaaaaagagaagccccaactaactagatagctattagccatgcccctctcctccacattctcatcttcaccagtcttaagaaattactaatccactttatgtctctgtagctttgtttattctggaaattgtatgtaaattgaatcatatgatatgtagtcttttatgagtggcttattgcacttggcataatgttttcaaggctcctctatgttgtagcatacatcagaacttcatcctttttatggcttaatagtattgcattgtatggatataccacattttgtttatccattcatttgttggtggacttttgggttgtctccacctttttgaaaattacatccatttttgagtggaaaatgatcttcctttagtggcttctacagttgccaacagcagtttccctctactgctttaaaggtagggatctgggcttaatggctttgtttgcgttgtgtggatggacaggttggatgcttggtcatcaatgtcagagagcagtcatagagagtactcatgagctttgtaatcagacgtactggtttgaatcatggatctgccacataatgagcttacataacttcaggaagcacgtttcctcgttggtaaagtgggaactaccttgcctgtttccttagagtcagagctatgctagaaactacgtggccttggggcaactcaaccaatgcagagggacctcaaggctataaaaataaataagtaaataaattttaaaaagtaaaaattattttttaaaaagtactctcacgcccgtaatcccagtactttgcgaggctgaatccaggcagatcgcttgaacccaggagtttgagaccaacctgggcaacatagtgagactctgtctctacaaaacatgcaaaaaattagctgtggatagtggtgggcgcctgtagtcccagctactcaggggagctaaggtgggaggatcacttgagcctgggaagttgaggctgcagtgagccgctgtactccagcttgggtgacagagtgagatcctgtctctaaatgaataaataaataaagtgcttaaagttctcaattttattaaggtatcatgcctcacagctcttccctaccaagcatggagcccaggatcaccaccctagttgcagtacccagagtggacctacttaattttgttgggataattcatgtctcccttcgtgtgtgttaatggcctctcttgatcttggatctggatttgtgctccagtcactaccccatcaggtcatttgacaagaatggctatagggagtgaaatgtttttccctctctgagaagatacagcgggagtgtaatttcattctttgtgggataggcaaggaggatgcattgctgttttttggtaagctttacctgaaagtagttatgccagagggtaggtggtgattctgagcttgcttatggttattgaatatccattggcacttatatttggggtttgtacgtgaagactgaaaatgccttttttagtaactggctgaaggagagatgaaatgttaatttgatccaaactttgcttggagagtggtgtttcagaactgattttgctaatgtcattaagaatcaaggaacccgacaattttggattttaggcaaggcctctctctacacccagagtaacaacttaaaaaaattattttaaagtaaggaggttttagaaacataaactcttataatagtggatcttttgagagaatggaaagtaagtcattttcctcatctaaacttagcttctgcccccatgatattggtaggaggtcgagaaatttgactgtgagaattatgtgaatctttattcctcttcctctattctgaccccaggtgagtggggacagctcttgcctggcatttctcccactggcttgacccattaatggcaactgtgaaaaggtcaacatttccaggctgacatactgaccacattttgtgtgggagatctcaacaaaagaatatttgtttctgggaggctgacatccccttttgtccattaagcctgtcctttccatcattagattgtgaaccttgtcagaattaagtagagcttaaaaacaaggaaggaatgagtaaaggaaatttagtttgctacatctaaatgcaaattgtgcaaaaacagatgggtgaggtaagaatggacgtcattcctggcgtgactgcaggtactcttggtctacaccatgatcctggaaaaggaggatttaatcatctgagttattaaccgttctcattaccttaggcattgtgactctgcttcctattgatcctagagctaaggtgccccgatttatatgcaaactcttgtttacctgcccaataagtgcaaaagggcttaagcaggtgactggggcctcacatgaagtgacaagactatttctgcctagaaggtacgggagctgagcgggactgagctggtctgcaggaaaggcaagaagaaattctgattatctgtcccaaatagagccatatcctgtctatgaggtggccagctaggagagtggaaacagtttagatctttgtctttggctactggtccgagagaagttgctgttcttcttttatccttggtagaaaaccttttcttcatccctacctattcattgctagagctggaggccaaagcaaaatgacagactgtaattttatatgagttattttgggactaacactcttataattatggttcacttaaatattataatattacttattgcaaaagcaatttatagggaattggaatttttttacagaagaaaaaaacgcaccgaagattttattattctaatatccttgaagttagcccggtgtggtggctcacacctgtaatcccagcactttgggaagctggggcacgaggattgcttgagcccaggagtttgagaccactctgggcaacatagtgagaactcatctgtacaaaaaatgaaaaagttagctaggcacagggtgtgtgtctgtagtcccagctaccggggaggctgaggtgggaggatcgcttgagtcatggaagtcgaggttgcagtgagccatgattgctccactgcactccagcctgggtgacagagcatgaccctgtctcagtaataatacccttcaagtttttccctatatgtttgcatatatggttttcatattgttatacactttcatgatcagatactccatagtagatgggttggctgatatgaaaggattttttgttttgttttattcctttaatatgtgtcatcaacagtttaaaacttacagggatttttaatactcatttagtgccagttgtctttgaaacaatatttttatcaaagattgttgtgacagagaagaatatcttcatggttttgttttggtcttcacttgggtaacaagttactggtatttggagaacaggagagactattttcctcagatttcgaaatggcaaagcataggagtgaggttggagaaaccacagggtctagcgggaaagtcttttacaggccacactcaagtcctggttggggttagcttcgcttagcagattccccagcgtaggaaatactgacctagttcttagataatctctgaggagtttctctgtaagggtatataagtatcctaaatgaataggtggaaaatacaatataagtacttttgtgagcctgagggactcttctgtaagatcaaagacaaatattttagtttgactgagaaaggagtgaaactttttaaataaacaacagtatttattttaatagggagtctgaggtctttccagtaggagttgggaaataactttttttcctcttaaactcatgctgcacaattaaagaaaaatgttttttctctgaacctttccttcaaatacttggcagagattactgccagaagaatgagatgggcacagtggctgatgcctggtaatcccatcactttgggaggacacgatggtaagattgcttgagcccaggagttcgagactagcctgggcagcatagggagacccatctctacaatttttttttttaaagccaggcagggtggtatgtgtctgtggtcccagctactcaggaggctgaggtgggaagatcacatgagcctgggaggtcgaggctgtagtgagctgttatcatgccactgtactctatctagcctgggcaacagaggctagagcaactctgtctcaaaaataaaataaaataaaataaaataaaataaaataaaataaaaaaaataaaaagaatcatttgtgagacttgagagacttgtaccattggattagaatctttcttggtactaaagtctgaaagagctggacttgagctaggttaaccatccattttccctaaccttcaaaagctcacctagtctatcctgcggacaaggatatatgtgctccacgataccgaaaaagatactgctggggcaagaattagcctgtcatacaaagcaataaacaataccaagagccaaaatttgacttcagtggcagctgtttcctagagcagtatttgtttgagtttccttgttgcaaagcatgcagctcacaaagtgccccaaactggcttaataagttttgtttgtttgtttatttgttttgagacggagtctcgctctgttgcccaggctggagtgcagtggcgtgatctcggccaccgcaagctctgcctcccgggtccacaccattctcctgcctcagcctcccgagtagctgggactacaggcgcccgccaccacgcccagctaattttttgtatttttaatagggacggggtttcaccgtgttagccaagatggtctcgattgcctgacctagtggtatgcccacctcgacctcccaaagtgttgggattacaggcgtgagccacctcgcctggctttttttttttttttcgagacggagtttcgctcttgttgcccaggctacagcgcaatggcgccatctcggctcaccgcaacccccacctcccaggttcaagcgatttttctgcctcagcctcccgagtagctgggattacagacatgtgctaccatggctggctaattttgcttttttagtagagacggggtttctccatgttgatcaggctagtcgcgagctcccgacctctggtgatctgccccttctcggcctcccaaagtgctgggattacaggcgtgagccaccgcgcccggccaataagtttttaatgtcttcagaattttttagaaagcgtcaactttctttaaaaataataggaccctctcaggctacaaatataaggagaagggaaggagacccaccctggagagttttggaggtgaaccccgctgtgatttcatggacaacatggatatctctgtttggtttaatacaaactttgaccagcttgatttgggggcctcctgtagccatagcacacactcttcagttatcaccacctattcctttcttcctggcttctctggcatttccagggggtgcaggaaagggctggtttaaggcagctggcataccttcctttctctcaggcttcctcactcctaggactgtataccatagtttcttcccatcaaaatttcgtgttcctctgctcattgcatttcattgttcagcataaattcagggttgattaccccacatgacaccctacatggctgaaaatggggtggatgtttcccaaaggaaattaggattgtggtcaggagagaaggggaatagatcatgggtttaccttaacaatatgtttaccctaagaagggttgttggataaaatacaggtattcagttaaatttgaatttcaaataaacaataggtaaatttttagttttaagtatatcccagatattgcatgggacgtatttgtactaaacaaattatttattatttatctggaattcatatttagctgggcatcttgcatttttatttgctaaatctgatgaccctaggtccctaagaaacttctcatgtctcattttatgttttttgttagcttacctggcctaagatttctttgctttggagaggtgctggggagtggcacggtgggcaggatattacacttgtgtgaattaagagagggcagggcataaataaagtattggccaagcagctgcttggtggcctcaggacggagtaggtgttcaacaacctgtgcgctgtgtgccaaggttgggcaacaccttgtttttgatactattcttagatgcacctttatgctgtgtgtatttcatcaccccatgtgcctacacattcaatatgggtggttttccaattgatgctcttttgtagtcctcgtgggaagatacctctggtatcttcccttggagtatggaaaaaaaggagtagaattttacctctaaccaaaaacgctcagcctgctttgggattttcaatgctaattactttagtaaagtaaaaattatttttctatactgaacatcacatcagttctggccattttttttttttttacatactatagaatatgtatatacttgaatgcaaacattctctttaaattctagctcaaacaagatattattagcttggttttatatattgactgatttcaactggatggattttaagggaggaaaacccataggaaatatgatcctgaggcaccgaggatggttataggacgtggtctgctgctgcatgttgcattactgtatgctgggtttttggtactctttctcaaggctctgttattagttggtaggctccagtaatgaatatagaggactgacagagtgggattaacttatttgcaattgtttcctactgaaatcaaatgcacggttttcccaatttaagacttggtcccttgtaccttgatttgattcagaaagccatctgtgatgtttttgtttcctggcgcctgcaggaaaactcatttgtcatgagttacaattaccttgcagtcattgctatgtggttgtagcacactcattgctaagaatggtttatgagtgtcaccttaatccatgagctcaactgggtgtcagacgtctaggaagggagggacttggtaggtacttaaatggtaaactcagggtgctgcatggaggtgattaaggaggtggcatttggtttgagtcagggcttttagtgctatgcatagaacaacttgtttccttttgagaatataattgtttgcatgtgatgctaatttccgctttttttttttttatttggaatctcgctgtgtcgcccaggctggagtacagtggtgcagtctcagttcactgcaacctctgcctcgtgggttcaagtgattctcctgcctcagccttccaagtagctgggattacaggcatgtgccaccatgcccagctagtttttgtatttttagtagagatggggtttcaccatgttagccaggctgttcttgaactcctgaccttggatgattcacccaccttggccttccaaagtgctgggattacaggcatgagccaccataccatgctcagcccctaatttttgctttattaaaacaaaaacaaaatttgagtcactataattctgtcacagaaggcagggatgaaaaagggtagagttggccgggcgcagtggctcaagcctgtaatcccagcattttgggaggcttaggcgggtggatcacgaggtcaggagatcgagaccatcctggctaacatgatgaaacccaagctctactaaaaatacaaaaaattagccgggcgtggtgggcgcctatagtcccagctacttgggaggctgaggcaggagaatggcatgaacccgggaggcagagcttgcagtgagctgagatcgcaccactgcactccagcctgggcaacagagcgagactccgtcacaaaaaaaaccaaaaaaaccaaaaaaaaaaaaaaaaaaaagggtagagttgtctatttcactaacaaccaacttttcctgaaaaaggactttctgtaaagattaagaatggtacgggcatggtggctcacacatataatcccagcgctttgggaggctgaggtgtgtggatcacttgaggtcaggagtttgagaccagcctggccaacatggtgaaaccccacctctactaaaaataaaaaaataaataaataaaataaaataaataaaatgaattagctgggcatggtggcacatgcctgtaatgccagctacttgggaggctgaggcaggagaattgcttgaacctgggaggtggagattgtggtgagccgaggtcacgccactgcactccagcctgggtgacagagtcaaactccatctaaaaaaaaaggttaaaaatgattatgatttctttttctaagtttattaagaaacagtacgtatcagttcattccccttagcagaagcaatgttattttagaaggatgcagcaaacttgatcttatatagtcccaagtgtggctcccatctccaaggtggtagccagcctggacagcttgaagaacagagactgggctgtttggccatgaatgcagcacagaatatagattcctgtctctggcttgtgtgatggagggtggactagtcaggactgttccagctgaagatgacagaggtctagctcacactagctggtgcatgaaccaagtgaggccaaggttggctccagatccagggacttcattagtatcatttagacttctcatctctctgcctcttggccatattgccttctccattggcaggaatatggcctcaggaaggttgggcatccacatcccaaacgagcagcctctaaagggacaagagggcttccctctacccgccctcacccgcccacttcaatgtatgccagtatctgttcatttgacctcctgtgagctcagcagagaagggtactggattgttcatcattcaggaatcacagagttagaatggagaaagatttagttcctcaatggaagtggtcatggtagtggtggggagggatgtggccggacgaagggaagtgattctgggcagacgataaccacatactttctccacagagagtgatgcaagccacatgggagatagggaccctagccttaaccctgtagcctggctggagagctaagcatatatgcaagagagcacaacattgccaaaactacatgaaggtaacgaggagatgcagaattaagtgcagccatgaagcatggcccttcagaaaggactgtgaggttctggcattgtatataaattcccatttgccataaatagtagccctctagtttgcttatcaggattgtatcttctctacacggtcacatagtggatgattagccctgaaagcaattacataatttccacttatacagatttacatttacccatagaaagtatttctctcctattcaaataaggatgtcagaatgcaagttcgtagaagtgatgtcattcaatggacaaaaaatggattaattcatcagaaagaaagacaacatatattgcaaacttaaatgatgtgggatgcctttcacagctaatggcatcatagcatggcctttgggactgcccagaattccattttatagctgtaccctactttgttcatctagcccctcttactgagcatttaggttctttcccattttcacactttaaatggccatatgataaacattcttttttttgagatgtagttttgctcttgttgcccaggctggagtgcagtggcacaatctcggctcactgcaacctccacttcccaggttcaagtgattctcctgcctcagcctcctgagtagctgggattacaggcgtgcaccacaacactcaaataattttgtatttttttggtagagacagggtttcaccatgttggtcaggctggtctcaaactcttgacctcaagtgatccacccacctcggcctcccaaagtgctgggattacaggcataagccaccgtgcccagctgataaacattctcaaagatttttaagatgcatcctgagtgcttcattagaatttgttcttagcaatggaattactgaatccaaggctattattgccataaatttcgatggggatagtaaggaaagaataatgataaactcagacccactttagtgggttactgaatcgagcacattattattattattttgagacaaggtctcactctgtcacccagactggagcgcagtggtgtgatgtgagcttactgcagcctctgcctctcgggctcaagtgatccttctccctcagcctcccgagtagctgggactacaggcatgcaccactgtgcctggctgattttctgtatttttggtggagatagttttggtttggttttggttttggtttggtttggttttggttttcgccatgttgtccaggctggtcttgaactcctgagctcaagagatctgcccagctcagcctctcaaaatgttgggattacaggcgtgagccactgcgcctggacgcacgctcacttgcttgctttctttttctttctttctttctttctttctttctttctttctttcttccttccttccttccttccttccttccttccttccttccttccttccttcctttctttctttctgggaaaatatggtttggttgtaagtacaaaaagataattatcattgttatatgttatttgtattatattattggtataaatttaatgtctctaataaattactttgacaattggtcattcatattttcatggtttttgaaaacaaagtgtatctttcaaataacaacaacttgatagaaaagatcattgcacctgggagaataataacaacatcccaaatttgctttaaggttatacctgaaatgtcattgtcagagaaacaactcataagtctgggttaaaacaagcctcttgctgattttgaggtgatcaaatttatcataataaaaaaatagttattaccaatcatgtcataagactggggggcatgcagtgagcagaagcagataggttgtgcaggaggagggtgtgggatatggattcataatctctaccaaaatattttttagataaaggtgagtgagtgagagttgaaataaagataaggaaagttcaatgattgattaaggcattttgactctttgggtcccagagcagacatccttatggtggcaaagaaaaaccacgtaactaattcggaaattgtgccaacaacatgttgaaacagtagtagagaaattcaaagtttaatgttaggtcactggtccatcgtccatgtacaactttgagaacacctgtaatgcattacatcagacattaaaacatatgtagttatttaaaaactgatctgtaatataactgggcatagaccatattagtatgatttctgtcttctgagtgaatgttttatttggacttcttcctctctttagatttttgctcttcctgtattttttctttctatcatctttagcaaaagattgctagtgaaaggagttgcacctggttaccttgattaacacatcaagagctctggaaaatctggttgctggtctccaaatagtcctgaccatgggaatatacaacaagctactgtggtgcagcggtctcttgctctcggggccttatttattacagcacttgctgctagcattagtcacttctgtttgggcactgtggttttctgcttccttccaataacattacttgagttaaaaaaaaaattacagaaatgtagtttcacaaagacttctgtgattagaattactgtctggaatttttaaaagcagacagcaaagaagcaaatttaagaaacttgaaaagtttaaaaacaaggactgtttctttataagggaggcctaaaaactgttgggttcatattttttgcccttttaaatgccatatttagtatacttcaaaacagtttaagcaaagcaaaagctgaggtagaaaaagcatgttattctgtgacattttcaggaccctaaagtaagaacggcagcacatttgttttcaggaacctgtggttcattcagcaaaattaattccaatacagaattgttcctatcaagggtgacatggattcttttatgatgctccagatttctggtagtttgtttgcattctctccacttgtgtcattctgagaaaagagaatagtcataggacactacagttgaaaagcttgagattcttgtgtaaaggctgatgtgtgtggtctcctagctctgcatcctagaggtgtggtttattcccccatgtggggcagatgcaattgtaactttttgcaatggaaatgctgttagtttccagacagatgggatgtgagctggaacttgaggacctagatagataaataggacctagataaaaatgatctaggcatttgtgttggctgctataaaaacatcctctgtcatgtggagtagataagatactctatgttgttttaaagaagtcttttacaaagaagatgagtgtgtgtgtgtgggggggagcggtggaggaggggtgcagaagaacatatgagatccagctccccagaggatcttccttaaggcacttggaactaagtttgaaggcactgcccacaaattctctccttcatcaagacttgtcaatccagctaagctctgtggtcacacctactgtcatcttagaagatgaattctgtggttgcctcaatttaatggctgaccaaagaggttccaaaaagatccagttagatcctcaggtctcatatcatggaggttggggtgtccatgacctctgtttatgctctgtgtgccacgcttccctttatgggttctttatctaaaaaataaagaaactgagttgtctgaaaccctctttggaggaggcaatctggtgtagtggttaagaatatggattctgtagtcagaatgtttgggttttgcaacatctctaaactgagatgatacgaaaacacctacccaacaaagctgtttctaggatttaagaaagcgtttttctataagagtgctataagatggagcccaggaccaaaatacatcaaagcgtgtagatgttaaatggagctaagtcccaaattgggtgactaaaggaaggtgtaatgatggaatcctgggtgcttctaatggaccaccaatttggaaaacaaaatttagaaatcgatctgtgagatcctgagagaacgagaccattgatataatatgatctccagtttcagcctgtgcgaggattaaccagcaacccaagaaggcaatattactggggccaccacatttttgggcaagaaaggtaaactgtgtcccttggcagtcagttcaagcctaaacctaaagtagtaggcttgaacaaaattacctttgttgtgctctaataaaaataaacagagtgtggagattgaagaaatcatcaaccagtgctatatacctgtttgtttgtttgtttttggtgacaggatcttactctgtcacccaggctggaatacagtggtgtgatcatagcttactgtaacctggaactcctaggctcaagtgatactcccgcctcagcctcctgagtagctgggactgcaggagcatgccactatgcctggctaatttttaaattcttttggtagagataggatttcactatgttgcccaggctggtcttgaactcctggcctcaagcaatcctctcaccttggcgtctcaaagtgttgtgattacaggtgtgagtcactaatctggcctggttccttttttaataatactactgacaaacactgcctcgtagaaactcctgtcagcgtgaagagttggaaggggaggggaacagtgctatttttcttcttcaagaagtttcagggggctcctcataggattgccttcaggagtgtccatactccctgcctctctggctgtttcttatcagctaaatggtacaacctccaagaggtgtgactgatggtgaatttcatctctttctgaaaggtgccatgaaaacatgcaaggctattcctctctgccattgtttctgtctgtctctcagcaggataaggtcatgacagaatggcacgtttatcttggatttccttgtttggcaagcagcctggatatctctgggttgaacgtctctgggtatctcacagacgtcaatgggttgaaggagatgttggctcttgcactgattctttcagaagcccaggaggtggtggggaggggggaggagaagaggggacaggattgtacttgtcgtgtcactgccctctcagttggagcttcctttacctttccaggctcctacagcgtggagaggcagcctagtataatgcaaggcacagagactttatgtctaaatagagctgtgttcaagtctcgactctgcctattttaaggtttttctcctatatactcctcaaaacccctgtacttattcttcgatgatattttttcacatctgacattacatctttctctctctctttttctgcatttgtctgtaagctttagatatgtggggaccacatctttttcatagctattagattgttaaacagtttctggagcttggcttactgagcttcaaacgctggctgtgtgacattgggtaagctctctagcctcttgcctgccttgggtggtgttgtcaggattagagataaatacatgttgtatcgctggcaccaagaccagcacagatggatgctcgagagatgttgttctccttacctcaagcttggtaccagcgcctcagtgtctgctgaccccaccagcatgcccggatgtatctgttggctgcaagacattgtagacccaggcttgtagccagcctgggcaggcagcttgttggctcaaggagtccttcgtactgttcttcagtccttcgaatgtcttattctcagacgctcttctgagaggacatgcctgcaaagagcacaggctttatctttggaatctcttgtttcagtccatccctaagaaattgacagtagcctttaaaaagtaacccttaaaagttatttcaaaagtaattatagttctttgttaattaagggggaaaaatctcccatagtctatcatttgtatatctactgtttgctttggtatacatccttccagatttttctatgtgcatgtactataataacgttgttttcttttagccaatggtggaatattctgcattttatttttgtatccataggagggatttttcagagtccatgaataatattggactctgaatattggtatgatttatggaactttattttattttactttattttgagacagagttttgctctgtttcccaggctggggtgcagtgatgcaatccctgctcactgttaacctccacctcccgggttcaagtgattctcctgcctcagcctcccaagtagctgggactacaggcatgtaccaccatgcccagctaattttcatatttttagtgaagacaggatttcaccatgttggccagactggtctcgaacttgtgacctcaggtaatccccctgccttggcatcccaaagtgctgggattataggcatgagccactgcgcctggcctgatttatggaattttaaaaggttccaaatcctttgttagaatgaggccagttagaaataatgaaaagtggctaatccgtggaaagccataagcctctagtggttttgaacttgaagaagcacagcaaagcacacacactgtgtgtgcattgacttatccacatgctactacataagcctggagagagatggggacagaaggaaagagaagacggattgcacactgctccaatccaattgccctggagtgagagtgagatgagatgaaagttcgtttttccttctgctcatcatggtccccaggagaccctcaaattgtgaccaccttgtcatggcacaaggtggctcctaaatggaaaccagctatcttctcagctatctgttccaaagcgggaggtaaaactgggtgtgctggttttaattaagagatagcatgtctaaaaatggcacataaacttaatatgcagttaggagattttcagggacattttttttctacattagtttcgcattttcttggtgactttagaaactaacccccttattagactctctggcctatgcacataaagcaacatttactccctccctccctccttcttactttttcttccactttaagcttctagtttgtgctgggactgcgggatgtagtaatgaataagtacatggcctttgtcctaaataacttaggttcagttttagaaagaaatctgaaaatgacttctcataatacctggcagaatgaaagaaatttattaaaagagaggacagcaggccaggtgcaatggctcatgcctgtaatcccagcactttgggaggctgaggcgggcagatcacctgaggttgggagttggagaccagcctgaccaacatggagaaaccttgtctctactaaaaatacaaaattagccaggtgtggtggcacgtccctgtaatcccagctactcaggaggctgaggcaggagaattgcttgaacctgggaggcagaggttgcggtgagccgagatcatgccattgcactccagcctgggcaacaagagtgaaactccacctcggaaaaaaaaaaaaagagagagagagagaggacagccattttattaggaaagtacagaggaagaaatacgtagttctagccaggggatttcattacatgggattacagagaagggtgttccctgaactgaatttttaaagatagggtcaaattttcataggcagaaagaaagggtgggaagcggacattctcaattaaggggaaaaatgagatcttatggaagctttaaagcctgagacatttgagggaacagaatttgagaattgagtctgcgatgagacaggaaaagcccacaggcagtaaaaaatgccggtggctgagtgcagtgtagcttccactgaactctgtggatgtttatgcttatttgaaccttgttggaatattcctggtttgttttatgaagggatgtctctcactgaggatattgactcagggacgtttcctctttcagtcaggatggcctccatcagaccaatattgttctcaggccatttttttgttttgttatcttggataaacagagagaggctgattcatttttctagaaaaacaggatgcactaaaatactgcaagtgacaatgaaacagacatgctcacgtacaataatatttataaagggaccaaacaatatatgtagcagacacctctgtggtgtggccgctacccctcctccatctcacttgccttgagtccttggccaagtgggttgtttctttcgatctgtttcctcagatatcaaatgagaccaataataccaactgaacaggcatgtctcaaggaattgatgagtatcaagtgctagaaatagtgctgggcacgtagtaagtagccattccaatagagcttaattatttgtgcactgggtacgaaatactgattcgtaattggagcaatatatattcacaatgatttttttaaaactttgtattatggaaatattcaaatatccataagagaacagtatgataatttcccacgtacctaccatccctccacttcagcaatcgtccacattctgccattcttattcattgatccccttcctcttttagaaatgttttaaatttgtaatggttaactgctacctaaattattttaaagcaaattctggagagcatataattttgtgtatagagagtttttaagagtctgataaatcagtgaccaaagaagaaatccttataaaaaaatggttgaaaccagtgttttgaatgcaattttcagagctgaattataggtatttctgcaaccaaattaggacatgtctgcaaatctttaagagtggcattttgaaagttcagtattgtttatttcatttaaggagcatgccacatgctggtctgcacatagattagcacttaggtgcatatgcaaaacacttttttctaatggaagatttaaaacatacctcaatactagtagactagtataatgtacccccctgtaaccatcacctaagctatctttttttttttgagacagagttttgctcttgtctcccaggctggagtacaatggcgccatctcagctcactgtaaactccacctccctggttcaagtgattctcctgcctcagcctcccgagtagctgggactacaggtgcatgccaccatacccggctaatttttgtattattagtagagacagggtttcaccatgttggccaggctggtctcgaactcctgacctcaagtgatccactcacctcggcttcccaaagtactgggattacaggcgtgagccaccatgctcaccctaagctatcgttctgatgtctccttttgaaagatgttcatattgtttgtaagagacttcttaggtcaaaagagccttaatgattttggaggaagatgtagaatcaaacatttatattacactacatgaaaagaaattcttattcatcagtgctattgcctttgaaaagtacagtcagtactgcttgatgtgggtatgttctgagaagggcatcattagatgttttcatcattttgtgaacatcatagaaagtatagtctactacacatataggctatatgcatagcctattgctcctaagctacaaaaactgtacagtatgttactgtactgaatactgtaggtattcaatggtacagtggtacaaatacaatggtaagtatttgtgtatctaaacatagagaaaggtaatgtgttgtgccacgacatttccacagctacgatgttgccaggcagtaggagttatttagctccatcatgatcttatgggcccactgttgaatgtaccatctgttgttgacccaaaagtcatgctgcacatgactgtgtgtcagtaatagctctcagaggaactgattttcccagatgaaatataagtaaaatctgatgtttgaaagcagttcaagcaagacccctcaaaagacatttaagcaagaacacatttggaagccagtactgaagtgttagtaatggatagggaagttatgtattttctcttctttcttttttccattcatctttctctctctctcatttttgtttatctgcattttacaattttttttttcaccgtgagtgtggattttctttcaccatgaacatggattatttgattgttgaaaaataacaaaagcccagctgggtgtagtggctcacaccactaataccagcactttgaaaggtggaggcaggcaggtcgcttgagtccaagatttcgagaccagcctgggcaacagtgagacctcatttctacaaaaaattaaaaaattagctgggtatggtggtatgtgcctgtagtttcaactatttgggaggctgaggtgggaggatcacttgaactcagggagggtcgaggctgcagtgagccaagattgtgccagtgcactccaccctgggcaacagagtgagaccctgccaaaaataaaaataaaaaagtaacaaaagaatataagttagtaaatcaaagaagagatgccgggagtggagattggctgtattgagatgagtatgtcaggggcagatagataatgtttctgaaccagcaagcttttacccttcatcttgctgcttgtctttaaccctttccttggtccctgggtcttgcctctgcattctcattactgatggtagggagtggtactcatcttcatgacataatctcattaggccaagagagaggataattggccatagttcctaggccagtcccctaagctgtgttaggctttcatatatgattctgtctggtcctgtgcctttacatttcctggtcttgccttctgagactgcccaggttttaagaggtgggtgttgggaaaggctaggagatggtggatgctggaagacaaaacactagcagagtgtagtctctccccttatgatcctgaaagtataaaaagccatctctgctctgctgccagcctacccacctgcactttggaagaagagctgttggatatttcagaatggttttcagactggcattggaaccgtgttctaaagttaacgatgatggaaataatttagttgtagaggactctagacaggcttgtgtaaagcaagcaggtaaaggaataaaacattaaaaattgtgtaggaagagatgttttgaggtatcagtgtaggtggattgtgagtggagtgacatggggagggagttaagaggagacgatgttcatggttaaagaaaccatttatacagacgtgacgagtgcaggaattctgatctctcatatgacaaatgctgagaataactcctattttccatgctaattgctaatttactcatcacattgaatatcctgctggtggaaaaattcagtgttgcagcctcatatcctcctgcataggaagtactcagtgacccaagatgttagagtctcttttatggcacttccctgaaaagaaaatattattacttaattggcaggcaacaggggcttttaagggactcatccgaacaccacctgtttacttacaagtacaaaggacaggaaaattaattacaaatgatacctttctcttaagggttctaggtttccagtgcaaaataatgatgatccaactgccaaagtatatactggtaggtggagtttttttttttttcttttcccctcctataatggattaagttaatctgtgagaacgtttacccaatgcccattgtaacaaaattatgtgaattgaccagatttcattaagtataaaatgaatgtacctcgaacttggtctttgatgtggattttgagctactatcaggccacagttcaggtatagcaaggatatgccccaaaaaagcattcctgtttgattatttggtgtttgattatcagaatttctggtctagaatacagtccaggtggtaacctttccaatatgagtgtcttcctaaggtgggtcatgagatgggttggagaatccagggttctaagccagtctcttgcccctgacgccatatgggacatgaggtgagttgcccagtttttatcatttgtcaagtaggaatagtaatgtctgatgtgattgaggattaaatgtaagtctaggcaataatgtaaatagaagtgtttttgaaattaaactgacatgcaaacttttgattgatcacagtaatcaatcagtgaacaaacatatttgtgagctatggaattagccataaatgtgaaggaagctagagaaaaggggaatgacatttccagtaagctagcaaacactctggagctatgttattaactgttaaaccatgtagtctgggtaggtatcattagccactttgccacaactccccacctcatatcctgtaccccattcaaattcagtcctttcattgctcagactcatctcgccttggccattctgcccctcacaatatgattttcccatttctgccttttgaaacgttgagtaatcaaaacttagatcaaatgtcagttctttcatatagtcttctctgattactccagttggattgatccctctctggcctatgtcagggataggcaaactttctgaaagagtccagattgttttttggctttgccagacacatggtctctgttgcttccactcaactgtgccattgtaatgtgaaagcatctgtagacaatacatagataagtgagtgtggccatattccaataaaactttattcacagaaacaagctgccagctagacttggcctgcaggctgtagttagctgacccctggcatgggtcattgtcttgctacgcagctttcttggttctgcgtacattttgccttaacctgcatgttagtggccttctttttaaaaaaaaagtttttaaaaacttttactattattcttatttttaaagatgaggtcttgctgtcacccaggctggagcagtggtgcaatcatagcttactgcagccttgaattcctggggtcaatctatcttcccacctcagcctcctgagtagctgggatcacaggcatatgaaccaccatgcccagctaatttaaaaaaaattttttttttttgtacagatggggtcttggttcactgcccaagctggtctcaaactcctgacttcaagcgatcctcccaccttggcctcccaaagtgttgggattacaggtgtgagccactgtgcctggacagtaaggcttcttatgaacagcagtgtccaggctgttttcttcttttgagtcccccggatgttgtataaataggagagtgttcagttgatgtttgacaaatgagtgaacagtgaatgaatggtggctgctttcagaagttggcaaccctgctgtccttctggatggctgagctcttccagccttctggcgtcctgcctcctttccctggcctgccctgctagaaagagaggagagaaggcatcttttctctgtcttcctcagccacccttccacttctttgagcaactactatttacaactcaaagaattctttatttatactgtgtgagagactgtttacccgtgttgaactaacattaggtttctttaaatctgctattaaaacgaagagtggccatttgtaactttaggagcataagagctgggttcatgatgtaagtgaacagagacacccttaaagttatttcccaaggccctgggaatgcgattttcttagtttatttgttacaagggagtgttttgtacattggtagaggaaaatactatgaaacaaaatcaaacaaaaacatcattacattttaaaatcattttgcaacactgagcaggtatgaatttggtactttgcttgtaattggaaaactggaaagttgaaaatttaagtatggatattatgattttcaatttttagaagatgtatagtatataatggcagtttgcatttgatgttagaaagaatagcatctcaagggaaaacaaaaatgctttccgttccagaaaatgttaaacattcctttttttcttaggataaactcactactagctacttttcttctgcctgagcccttcattgtaaaagtgaattaatgttgtcctctgaattctgttggggaaaatgacacagaacccctgtgaatgaagaattgcttttaatttcactggacgtgaggcagaggaggaccttggaaaaggaaggttattatttcctctgtggaaacgtttatcttcgttttctgggtgactggtaaaaacaatagtttgctgtggagtttcagtaatcaaagaagaggaaatagcatgtgagtgactgcaagttggtggggacaaccctggctcttttgaaggtgaaacttactaaagccacattagctatctcctagtgcaaaggtcgagaaacattttctgtaaagggctagaggtaaatagtttagacttcatgggccataaagtccctgttgtaaattttcagctctgctgttgtggtatgagagcagccatagacagttttagaaacaaatgagagtagctgtgttccaatacaactgtatttatggacacaaaaatttgaattttcatatgtcacaaaatagtattattttaatttgttacaattatttaaaaatgtaaaaaccattcttagattccctgttgtacaaaaacaggtagtgggtaggatttgggtgcagggcatagtttgctgaccctatcctggtgaactagcgcaataatttcttaggtggggaggtgtagtggataacacattacacattctgtaccttttagtaggtaatccgattatgattagctaacccaaacttgtgaagaaaatttcctggtggagttggatggctttgaggagtccagtgttcttgtccctgccctgttagtgtaaagctgaatggcactttggaccttggctgcccatctggtacatgatgaagttggactagatgacttctagggcttcgtgtagagcttaacattttattttaattaattaattaggttttttttgagacaaggtctcactttgctacccaggcaggagggcaatggtgtgatcagggctcactgctacctctacctccaaggctccagcaatcttcccacctcagcctcctgagtggctgggactacaggcacatgccaccacagctcactaatttttgtattatttctattttttttcttttgtaaagacagggttttgccatgttgcccaggctggtctcaaactcctgggctcaagcagtcctcctgctttggcctcccaaagtgctgagattatagcgcgtgagccacttgactgatcttaacgttttagaccctttatcacttgtgttttggttcttcttctgataattattgcaatttaccttttaaaaaattatttaggcctggcgtggtgactcacacctgtaatcctagcactttgggaggccaaggcaggcggaccacttgaggtcaggagttcgaaaccagcctggccagtatggtgaaacccccatctctactaaaaatacaaaaaaattagccaggcgtggtggcacatgcctgtagtcctagctacttgggaggctgaggcaggaaaatggcttgaacccaggagatggaggttgcagtgagccaagatcatgccactgcactccatcctgggtgacagagcaagactccatctcaaaaaaaaaaaaaaatttagatatttgttgagaaactaatatgtgctaactgtgcaggctctggtgatggtggttgtgtgtgtgtgcacatttgtgtgtgtgcatgtgtgtgaaacagatggtagggtagttacaatacaaaaatgtacatattagtattctaaataaattttttttctattttgtgcagtctttcttgaagttataaaaacaatataatgggcaattaggcatttacactatttttattaaaaataataaatgtatatgaataattatactcagaattcaacaatatcagatattgatttttgcagttactttagttattcatttatttattcattcatgtaacaaatagttcttgagtacctaccatgtacttcaaggcactggcttaggccttgaagactaaactatttgccctcacgaaacttgcattctaatggaatctcctgttgaagatgctaggtagatggttttattcgtacttttcagaggaggtgtacttattcattacttatttttctttttttgtttcagttatctcttgggaaatctctgagtaatgtttttgaattaccagaggaaattttacagtcacacaggtctttgttgacttttgcagtcgcctaaagttgttaatcattgaagagaactctgattcctcactgacaaagaatgaattctatcgttttagttatattagttaatttggaaagtacttcaatcaatttaaaactttagggaagatcaattcagtaagttctttagaaaatcactacgtcaaggctgggtgcagtggctcacacctgtaatcccagcactttgggaggccgaggcgggcggatcacgaggtgaggagatcgagaccatcctggctaacatggtgaaaccctgtctctactaaaaatacaaaaatttacccgggcattgcggcgtgtgcctgtagtcccagctactcaggaggctgaggcaggagaatggcgtgaatccaggaggtggaggttgcagtgagccaatatcacgctactgcactccaacctgggcaacagagtgaaactctgtctcaaaaaaagaaaagaactatgtcaaattctcaaaggtcactgaagttaacccgtgttatcagtcttctaagcagcattagtggatttatatttatgttacacatttctcctcataaaaaaagatttcacatgcatttattcaatgaatactaaaaaagatgaatatttcaaaaagtaaaagcaactgaaaatagtaatatctgttaaaactgcgtcatggctttgccttgatatcatgagttttgtctgcttttatgagggtggcatttttgggctttacaaataaaaaaataccattgtaatagtagtattataaccgtaaccaatagtccaacaatagcgaaagcattcactgtgtatcactcccctccaggccaccccggctttgctctgcttctagtcagagtggatgcctcgcagttctttttgaataaagttaaatctgacttcaggtctttcacacacacatttgccgccctttggaatctcttccttctctgcctttatcatctagttaattcctggtaagtctcaacttgaaaggtcttctctttatggaagctttccctgagttttatgtggactgaagtttcccctgttagcatccttacttcttctgagcaactgtaattgtttatgtcattatctgacaagaagctggatgaaggcggagtgtgtattgcccatcactctattctcagcacttggtttgaatgagcctataagtggtattttacccacccctcacaaaagaagctatatcaatataagctattattcgtgtaatttagtgagaaatactgatgtttcctcaccccatagttttgtgtatcttttgtagacctcagtgtttcatgacctatatattataatgtttactgactagatttggtcagttactatttgaggaaatgctgggatttcttagaaattttaatgataaaagaatgcatagggccagaatgtttgaaaccaagactgccttagagaaacccagggcatatagcagacacatttttgacctgaaacgcttaaagcggaatgggacaggaaaatacatatgcatgaaataattagtatgtttctcagtctgtccaggctactataacaaaaataccataaactaggtggctcaggaaacaacaaacatttatttctcacagttctggtagctaggaagtacaagatcaagacaccagcagatgtggtgtcttatgagggcctattcctcatagatcatgccttctacccgagtcatcatatggtagaagggataaacaagctctctctggcctctttcatgagggccttaatcccattccatgtgggctctgcccccatgatctaactaccttccaaaggccccatgttgggaggttatatttcaacatatgaatttggtggggacacagacattcacaccatagcagtatgccacctgtgacagtacctgtttgtctttatagctgtgttctcttgtttctccagtatctcagtggtattggacaggatattagattcaggagaggacttcagaatgttaactagtggtaagaaagcagcttcatggggtggctggggcttgagggagtctgtaactcgggaccacattttagtaactagagaaaatgtttcagcaactgtatggtgataagtccctagtctaaatctctagcacaaatctttcttttgagtgctggataccctattcttttgcccattaaacacgtctacttgcatgcgccacagtcacctcaaaggcaacatgtccaaagcaaattcattatctcactctcgaacttgctccttctccgttgttatggaactcagtaaccacattgctcaaattactgcctcacccattatttcttcctcacctatcacatccagtcctccaagttctctcagtcccgcctcatacatttcctccataacctgctcccttgtctatgttttctagtgtaggtcactacactagaaaggtcatcctttgcttgtgctcctgcaatagtcttctaactggtctcctacctggtagctggtcttactctcctctgatccactctcatgctgtggccaaagtgattttctaaaaagacagatgtcttaattatgcatgtgctttgaagctcctcgtttggcatttaggataaagttcaaatgccttagcttatgagaggccctgtgaccaggtctccactctccaaccatattgatgatcttacagtttctcctgtgtattgtgctgtctccggcctctggacctttagtgctgctccttctgtctaaattacttgttttctcaattagtgacccttccctccttcagtgcacaggcttggaagcctatccatgaatctcactaccctgaaatccaagggataaggtgaccatgaacctcagcacctcaagccttccattgacatttccctcctttgctccatgggtaagaatgcagaacgtatggcttcagcttctgtgtgggcctttctctatgcctggtttttcctggcacctgtcctcccacctgccttctggcctgccagtgtgtctgatctgagcagactgggagggtgtgaagaagggccagtaccgcttcagcaggaagggcagcacacggaaggccagcagccttgggctggcctgcatctgcccctcacataccctacagagaaacactgagcagctggtcagcatgtgggctgggaggaatggggctgggctaggggactagggattaaggcagcccttgtagcagcaactgtgacacaaggagcacctggccctcctggaagtcccagggctctttctttgacctccttccttcacttcctgcattttctaaattgtagctaaaatttgagatagaaccctaagagtaaaacctggccctgctagcattgatttcctgagattaacttctcttttagctaaggagcatctctggatgatgagtagagatggaagccaagtcatgtgcccttaaagtcctgtgcaagctccttcccgggatgtggtggggtgtgcatgcagtgagctgtgagggggtggccctgtcacagggaatgaggcctcagccattgtctggcagtgttggcagtgtgattttaagccagttatttaacttctaggtctcaggtccttagcctataaagttgggataatacttatcttacagggttggagcatgaaataaatattaagagaatcaaaagcaaaaatgctttgcatattatgtaatatgaaactatttttcatgtactactacttatagtattactactatttatggagtttaaaaagtttctgtgttttgaatatatttaatgaactcagtctttctaattatctgtatgtatcatgaatacaacataaaatctatgaccgtggcaaaatactatcactgaccttagatgtggccaatgtgttcttgactgagatctgtacagcttcacatgcttttttttttttttttttttggtatgccgcttatgtagcaccagtagaggatttttttttcattgacattatcttatattcccctcattattaggagaaaatgtcagttgattttctgcgttactaaggacatgaacaaagaaaactgtgtaacacaaaactttctgtgtggaatagagaaatttaatcactgtcatgatttcatcagtggggcagttcacagctttagggcatgccaatgagctgtatcacttcagagttaaccaaagaaagaaatgtaatgggggatggagaatgtaattagagtggagtacaaggggggggtggggaacctttgtaactaaattattagcattatcatgaagaaactgtcttttgaattgtttttaagctaaagaaatcataaagcagtgtttttatgtgactatgtaattccccttgtatttgaggttaatatgctgcaaattcttcataaatcttcattaagatgtcaaaattccttgtgaagcctgtcttcatttgcattcccttgtacagttattaacaaagaccctttatgtctctgcccagcttgatttcagtcatgaactccattttccttttattatttcatagaatctggttccttgattgaacttagtaaatcatttcttgaggacttggtgggaagccagagagtggtagtgaggggggcagtttatgagcccagggtgggtggagacccttgttcctcaaagcaagacattattaactttagagtctcctcttatcagatcttaaaaattcttgcccaaagttaatagtttttgaagtttgcaaatagatttctacagttgaaacctagagtagaaagaagcctggttatttatttatttatttatttatttatctttggctttaaaattaggcttttctggccgggcacagtggctcatgcctatcatctcagcactttgggaggcccaggcaagcggatcacttgaggtcaggagttcgagaccagcctggccaacatggtgaaaccccgtctctactgtaaatacaaaaattagctgggtgtggtgatgctgtaatcccagcaactcgggaggctgaggcaggagaatctcttgaaactggacagcagaggttgcagtgagccgagatcgtgccactgcactccagtctgggcaacagagtgagactccgtctcaaaaaaaagttgggggggaagccttttctcaccaattgagtgtcagtgtggccagtgtaaacaaggatgaaaatagctatttgaggggtttggtggccactttaaagttgtgtcagggcaatgatcaacactagagtttcagttcctgttgagatctgtgctctctacctttcagtctgtgagactgagtcggaatgtccccaagtatttaggaccctgtgactgctggaatttcagggttgctcagggtccagagtgaaaagaacgctgctgccaataacgccttcccatcttgggttgcctttgttcacatagctttgcttattctttaatccaaatcatcagctcattccaaaatagttgctagcaaaaatacatgtgaatgctcattcaagaatataaaggatattaaaatatcctcttatatcatgactctgcagacggaaaattctacctgaactttgcctttggttttcttaacatttcctcttagccctacgtagatacatttttctcctgtgggggaaaatttattgtttcctcattttcccccagcattatttgagtgtctgcaaatgcatattggtagtttttctagtaggacctggtttgtggttgttaatggtaaatgtgaaaattagatgtagtccaggctcaaaaggagtttaaaatctgatagaaataagactttccacaaccactagtgtggcaaaatctctgtgggtaaatgtaacttcaagcataatgtacccatctctcacattttgctcaagttgaatttcttccgttctgaggcagccactccctctgtaccatatgattacatggcttgcttacttgctgtactgcctttagcattgtcggttgggtgttttaaacctgcacgttttatttctcaagtagaccggaggatccttaaaaggtagccaaagaatagaattatataatattttaaaaagtaaaaaaaaaaaataatttttttcatattctgggtcattgtagctttgtttacaaggactttacatgttgaagaattggaggatgtattagttttgggttttttaggttggtttttagagaagtattaggaagttcccaaggggattgaccttgtagtttcaagaaaaggagaaatggtcatgcctgggcatttttgggtgctttgtttgaaatatgcatccacttggctgggtgtggtgcctcatgcctataatcccagcattttgggaggctgaggcaggtggatcacttgaggttaggagttccagaccagcctggccaacacagtgaagccccctctttactaaaaatacaataattagccaggtatgggggctcacctgtgtcacctgtggtcccagatactcaggaggctgaagcactagtattgcttgaacctgggaggcagaggttgcagtgagctgagatggctccattgcactccagcctgggcaacagagtgagactctgtctcaaaaagaaagaaaaactataaaaaattataaaatatgcatctacctcttgaaattgatacatttttgaatttggaaatgttgaataattagagcctgagcataggtctatgttttgctaagataatgtacttgggagggtggttaaaatagtcattaattttggtcacaaatttaaacagagcttgcttgacagggacagcttctctctgtttcatgcagtgtcatttggagtggcttgactgggggacaagggattaattttcaagggggctcacccacatgactagcaagttggtgttgactgtcagccaggcaacattttctttccaagtgggtctctctacaaaatgcatgagcttccttatggcatggtggctgggttccaagagtgagcattccatgaaacagaaagtaggagccatgagttggtgccggaaactggtacatcatatttaccatattctattggtcaagcagttgataatgtgaattttaaataggaaattttatgactcatggaaagactttatttggatttcatttaatgtatcaaatgggtaccccagggtggctattgccttgaggaaggtgctttatttccactaatgtataaaggaaggtgccaggcccatgaggtacaactaatgcttattatcaattttattttattcttccccttcaggtgagtggagtgagtgtcaaggacagaggactgaggtcccagcttgaggtgcttggagggacagagaagaatcagggtgaggaagctgtcaggctcctcttttcccttttggccctgtgactttattagcttaactaatacttcatagtgtttgctatgtaccaggcactttacatatattaactcaattatattcccatcggggactgtgttacaggtagaatcttaattaaagctactgctactgattcttaataatggcattacttgaagagattattattaataggcccttgccccatttgattacactgtgtgatatacagttgtcccttggtgtccggaaaggattggttccaggaccctggaagatacaaaaatttgacgacgctcaagtcctttatagacaatgtcatcatatttgcataaagcctatacacatcctctcttatactttaaatcatctctagatttacttataatacctgataaaatgtaaatgcaatgtaaatagttgttatactgtatcattgtattgttttttatttgtattcatttttacaaattgttgtactatcattatttattttgaatattttcaggccaatgttggttgaatcccaggatgtgaaacaggtgaagatgaagggcccattatataccttgtcgctatttaaagatgtctcaaactcttggaattttgatgtttttgaacatgtaacttaatggatcctccttcatattattgtagtttctcttaatactaaagtagatattattgccttggtgtattttacttttaagtttaaaaaatttttgatttaatgatactcttgaggattttagtttgggatattaccactgtcaaagctggcaggttcttcacttgattaagtcttatttccactcaacaccatttaagtagtttgagactggttataatgagcattggtacaggactggcccctcttttcagtcaaggtcagttggcaacagctatacactgtttctttattttggaaaggttttgcttgcgcaaagacttactcttttaaccaaatcctgcttttcatctgtttttgatggcaacagaccatatttcccagccatttgcaaacagtgcctgtctggcgggatttcctggacacagcccttgacaaccattactggccaacttttgaacttcagtgtttaacctggttatttgttctgtgttttctgccatgggccatgggaaccataagcttatccttttgagactagcagaaggtccaagaacaatccatttgctaattggacccattgctttccccagcccattaaccttcatgaatcaaatcttccttccaatatccagctattcatctacaagtcagtactatgcagagtgatactttctaaccaaggtgcctatggtagaccttggtcattgccattttggaatctttaccttatggactgatataatccaaacatgtcagtgtgtcataaaaattggttggccaattaaagataatttgatagtgcaaatatcattaaaattgttcttatgtacaaataataatttaaaaatccatatataatgacttacaagtaataaggccgtacttttttcactctaaaaaaaataagcaaatgataaaacattcatgctctttgacccagtggtactgattctggggctctagcctaaagaaataactcaaaacattgagaaaagcttatgcttatggatgtttgttgaagcattatttgtaatgaataaagaaaaatataaatatctaacagtaaggaattgttaattaaattatgatgttgatgaaagtttttaacggcatttgaatattgttatgatgttaaatgaaaaaaaaatggaatacagcattttccacaatatggtcacagccatggaaaaaacatgcattagaaaaaagacagaaaccagccaggcacagtggctcacgcctgtaatccaagcaatttgggagacactaggagacactagaaagaagattaaagaaaatttcaagagtgcttggcttgagtgccagtcagacttgggtccaaattcctactcttttacttatgagctatgtagcttcaggcaagtcttttaaacttttgagcctcagtttcctcatttataagatggggataataatttttccaggattattgtgagtattaaatgagataatgatacaagtaaaattcttgataatctataggcaaccaacagctggatggtggcaagtactaattcgtagcttcaagatgttctcagttgtattcttgactttggcattcttctgttacgtttgcactgatttttgacatgctgctaggagacaggtaatgtgaaggatctattggggggtttgcctttacggcttttctggtacattgtaggtcaaacaccaacacctgtgttaggccctgtcacatattcagggaccttcactgttcacctgagcttaaccaacaacactcacctgcaggcatgcacttgagtacagatgctgcttgttttgagtgaagcagatacagaaaatctttaactacaatcccatttataaaagggtggagcttatttcttttaaaaaataatcattccaaaaagatttgcacagaattaattttcaaagggtgacctctcttgtgcatttaaaatgtgattcaagcaaaccaaacaaaaaaaggattcggcctacactttcagtggcacgaagtaaagtgcacttgtgtccaaggttggactccttgcttttcttccaagcatctttcccagtctcatcatttactagtttatattttaaacttagcttcagaatgcttatgctgatgttaatgagtctatcttcaaatgctattttagtttatcttttttactttattttatttttttttgagacaggatctcactctcacacagctcacagcagcctcaccctcccttgagctcaggtgatccttccaccccagcctctcgaggcactgggacttcaggtgtgcgctgccacgcctagatagataatttttctttttttcttttttttttccttcttcttcttcttcttctttttttttttttttgtagagctggggtttcaccatgttgcccaggctggtctcgaacctctaggctcaatctatcacccatcttggcattccaaagtgctgggattacaggctcctggcctattttagtttctctctgttctttatagtggatccttaaggcatagagaattttaggaagagtatgagcatggaatagtaaagtcattgttgtcagcatacgacagagggaaagtcactgagtctttttgatccttggcttccttatcaataaaatactaatattggcactgtttacctaacagttattgtgaagccaaatcacaatagctaacatttattaaacaattatgtgttctaggcaccatgttaagagctttgcatgctttattaactttaatttcagggtaactttatggagtagatcattgtgtcctaatcataatggtagctaatatttattgatagttttctatctgccaggttttgttctaaggtctttgtgtgtcatagatattggtagaaaatggaggcaccaagagattaagtaatttgcccaagttaatttaagtagaaagtgtaggagctactattggaacacaatctgattccagacgtcttaaccactgtgcaatatctccactgtatagatgtagaaactgagaaatagaagcacagtagcttatccaaagtcacacagctagtaagcggcagatcttaccttcaaacaagattcgccattgcgcacatcattatctgttatgcaacatggcttcaaagtctgagtgatggcaccaggtactgctctgagtgctcttcagcctctgtcctcagagtcaagaaaatgtgtaccagtggcgggtccactagaagatccactgcactacggctgttgccttgtgtattcaaatccacagttcctcatgtcctgaggtcagcgagccacagagaagtgggctcaccttttctaacttaatcagtgcactgacagaggaacaggttacagagggatttctctgggaaagctgtggtgccagggcttgcttgtgcccagcaagggaattagaaatgccagggctaattccccagtggagaatgattcagaagaaaaatgaattcctgaaggctgttgtgttatcagtgccaggtctgagagagcagggcaggaatatgatggcttgtctttggaaaacatccaaacaactttcagtttcagaacagacttcactacttctcttagaacacttactgtcctttactgtaatttttgttataactggaggatagaaggaaatatgctatttgattttatgtacaaagaattttgagtccattgagctaataatgtctcccaagacaataccagtttatggagaacttggttttttgtttttgtttttgtttttttttgagagatggaatctcaccatgttgcccaggctggagtgcagtgatgtggtgatctctgctcactgcaacctccacctcccgggttcaagcgattctcctgcctcagcctcccgagtagctgggattacaggtgcgtgccaccatgcctggggtaatttttgtatttttagtagagatggggtttcaccatgttagacaggctggtctcgagctcctgacttcaggtgttcacctgcctcggcctcccaaagtgcagggattacaggcatgggccaccgcgcctcgcccaattatggagaaatttgaaccataatatgaatgttaatttgggaggaattctactgcagttcattttggaaacttgaaccaagtaggaaggattttattgttaaaaaaatctgatcacattttatgtaataaaatgtcaaacatgcaaggagagagtaatagggtaatgacccaccatataccccttgcctagatttaagaattgttaacatttggtatatttgtttaatatgttatttaatagtagtattttcaagcaaataaaatatatgatattttactcctaaatacttaaatagttgcctctaaaaaagaagaacattttcttacataacaaaattactatttacatgtgtgacaaaatcaacaataacctatttttttcttttgtttttgaacattttcaaacctgaaaaaatgttgaaagagagtttgctctttatctaggttcagcaattgttaacctttttccaaaagaagttataggcaaggctgggcgcggtggctcatgcctgtaatcccagcactttgggaggccgaggtgagtggatcacgaggttaagagattgagaccgtcctgggcagcatggtgaaaccctgtctctactgtaaatactaaaattagctgggcgtggtggtgcatgcctgtagtcccagctactagggaggctgaggcaggagaatcgcttgaacctgggaggcagaggttgcagtgagccaagatcgcgccactgcactccagcctggcaacagagcgacactccgtctcaaaaaaaaaaaaaaaaaaaaaaaaaaaaaagtaaaaaagaggttataggcaatatgagattttccctaagtactttagaatgcatttcctaagaataagacattcttttataccataacaaattctattattatacccaagaaaattaaccttagtacaataatatgacctaatatttagcccttattcaaattcccccagttgttccaaaaatgtcttttgtagctctgtgtgtgtgtgtgtggtgtgtgtgtgtttgtgtgtgtgtctgttttccccagtgcaggatccaatcagattcacatattgcatttagtaataattatgtttctcctgattcaaaaagtgtctctccccttgaccattttgtttgtttttcgtcttaacctgttttgaaaaaaactttagaccactatcacacacgatgggttctttatgattaaattaggttaaaatttttcacaaaaatacagcataaatgattttgtgaatttcttattgtatcttatcaggatagaagcaataatttcttaaaatattatttaatatccagtacatattcaaatattcctaatggtctcagatgtgtttttttacatcggcttgctcaaaccaaatattgtacaccatttaaaaaaaatcgacatagaaaaatcaattacagtctttttgagggggagggggaactcctaaaccagaataagttcagagaggccccctgaccacagtcttaatttctattccttgtaaatgcctcagagtaattcttaggcttctgctatatggaaactacatccctttgtcttttatacaaattacttgaaaaaaatggaggtaatttctcttgattactttaagaaatgaagtagaatttttgtagaacagtatacaaaccataaataaacggcttgatgaatttgcacaaattgaacacacccacgtaagcaggtctctgacccaagaaacaggatttttcccagctccaaaaagcgccccttccagattccccaagggtacctactctaacatccagcgtcatgggttcatttgccttatgcaaatttcttctctttccctgaaaaaggaagcacgaagtagagaagccatacaaaatatgtatattttaattaggtattttgaaagcccaccttcaaagacattttaaatgatatactgtatatattttcacacaaaataattcccacaacaatgttttacataatggtttcattcaatggctccccctgcttccctagaattgggatttcatccaaaacactaaaggttaagttatcaatagaactcaaagagcattttgtttccatttgtataagtcgtttaatgttttttaagtccacgcatgtgttaacaaaggaggcagtcaattacaggggagcttagcaaggcattcttagagttctcttcagtggtgagcagtgtcgaagtggaatcaggaaaagagcaacccttttcactgaaggaaattattttaattagtaattctcaaagggtaataaacagtcaaatatttctgaaatctcctggctttggggcaagtaattacaatgagcatgcaattaaaaaaaaaaaaagaaagaaaactaagacgagggcatgtacaatcaattaaatagaagtaattacattatgagggcttcatgagtagtgtacggtgcattaacattgtggagacaaaagccaccagacagcacattgtatgtgcaagtcttttgaatctgaggttggttttcatggtcttctcgattctacgttgtggggctctgccactggtagtcggtaactttctaatgcactgaactggcaggagtgatggcagcatgcctatttgtggtgtctagggaagccttcttaaatcattggtatgcccagcctaaatcagatcacgcggatcctgcagtcggtatctgggtgatactgtgattggtacatgagtgtaacttggctcggtgtgcctggagttttttttagcagggataggaatctaccatctctggtgtgtttttcaatgtggcatgccccagtgacattagtggagaagggacttgctaaagttagaaagtaagattgaacagctgggttcaaggccttatactaggttcccaccagctgtttcaaagggatggagaggagccacccagagtgctttgcagcagctgtgaccccgaaccaagggaagctttatttcgaaagcacactaagaatagatacaggctcctgattttaaaatacagcggacgattaaaagctttctgggtataaacagttcaggtcactttttaaaaacacaagttaatttcaagctatatggaaatttacatgtgtgttttacatatgtatatatatttatacacatacatatatgcctgtatatatatattctgatatatgccgattaatctctctaatctatattagctctgctttgaatgaactttgtcgttgggatgctttggcatcagggcttcatagcattgtacttacatttattcagtgcctttggataggaacgcctgtagtttttttagttctggtcagttgggtataaaatattgccatagtgtcagaagcacagtgtgtgttcagacaatgctgttgaatctgaagtcatgcttgtaataaataccataaatagtatattttgcaacttcttaaaatgtattctataggatagtaataattaagtgaaaaaagttacacataaaatgaattacagaaatgtgggattaagctaattgaaaactagaatcttttatatgcatatgtattgtataaatattaggagaggaatataacattcagtgttttccatacttatttgataacagaacccttttgggtgcaggggtgagggggattatcttctaggactgatgttttatagaacatcattgaggttaccttgccccatagctgtgtctcctcacagtctggttgaacctgaaagcatttgttaccggagaagtagattttaggtggaaataccagatgcagttggcagaatcagaagtgtctctccctttgctgaattcacaatgactttgtattcactaattctttctcctaccccctcccgcaatgtttctcacatttggcaacatatgataacatttgtacattttcccgcacttttgtattaatatatttattacgggtctgagtatttaaacatgaacttttttctcaagtcatttaaaatgactacaattcctaacccagaatgaaatgtttcttctaatataactatttttaatttcagaatacattgcaaaaatgttttttgtgtaaatgttttaaaacataagatattatcatgaaaaggtaatttcttagaaaaattggaatttatctctactacttttttttgtttagagaaaatttaggaaaagtgaatgtacatcttgaattttagttaagtaattacagttatatagtcaattataaaggctggttacatagcttattatagactgaacacattttatacaacagccctatttgaatattttccctagttattaaaataatgaaaacattaataaaaactaaaggcaatatgatattaaaagcattaataaaaatggaaggcaagttaggctaaagttactatcagagactggcttctgaaggaacaggttttggctttccaagtggcagggccttaagaatcacatccccagctctggcttagggttccagcattgctcatggcatattcagctgttgccttgcatctccaaatctatcttcagagtccttttacctcttccttttaggtcatagtggagagttggcgttccgctttgtatttatgtttttttaagtagtatttgtatttctttctttcctttctccctaacaactacaggatcacatggacctaatttgttttattgtcacaagagtcccttttcttgacaggatatgcctaattaaaaccagggtgttaaaaaaaaaaaaaaagctaagttttgcaggcaagttgacatactgtgtgactcaagggtttcaggagggacaaggagggatggtggtgtgttattgaagcaagaggaggaccaagcctgcaggagatattgttccaggacaaagtcaggctatcagcagtgctgacggtccacctccccttttccttccttcctaatggcccaagttatgcacgtcagcctctttgggttcacaaggcagtattgtatcatggaaaaagccctagaccttattatgagaacaagatttgactctgctctgccacatggaaactaagaacttattaagtaggtttacttcacccaactctgtttctgtatcttttttttgagacggagtctccctcttgtcacccaggctggagtgcaatggcatgatctcggctcgctgcaacctccacctcccgggttcaagcgattctcctgcctcagcctctcgagtagctgggattacacccgccaccatgcctggtgaatttttgtatttttagtagagatggggtttcaccacgttggccaggcttgtctgaaactcctgacctcaggtgacccgcctgcctcggcctcccaaagtgctgggattacaggtgtaagccaccgcacccggcccatttttatttcttaaaaacagagattagtaagcctgttatgtaatgatcaagttaagatcatttttgaagccataaaatggtatataaatgtcaactattattatcagacattaacagcatggttattgtgaatattatgactaataattaatatgaataattattattgtaactatcattattaccatgattgtcattattaggaatataagtagcaattcattcaacatacatttattatttagtgtctattgtatgctagatatggtggactttcaggacccatggtgtatagtacctggtagaggctcagccgagcagtttgcagaatcaacaggaatgaattgagaatgacttaatttgtttaatagaatgtgacagcattctctagaatttgttcctttctggggcaagtaaggaacaaatcttcctagattagttttatgagtacttacagataaaaacatatatgatgtgaataagattcaactgttatatttgatacctagaagcaaaatgatttgtcgaagtaaacccattaaatatgttcattcattcattcattcattcctttaattcagtcacttattctatgagtagttttttaatgtctgctgtgtgtaaggccttctgcatttagtccatagttggggctactgagaagttgaaagctgctttaaagtctcctttcattttaacaccattaaaaaaaaaaaaaactcatggaaaggaaaaatctaaatgtatcctgtaaagaaaataccatttcctctggtaattatgatggtctatatcctgtttaactcattgcacggggttcctctccaagtcaatgaggattgcgtaaagagtctgaaggcaggatgtgcctcatagtgggatgagaaggagccttgtggctggtcgtcagactaaatttaaaccattatttgttgtgaatatatgattaacgtgggggttaaaaatgaaaaatacagctgcaagagtaggtttcttcctttgataaaaacagaaaaagtcaggagggacaagaagaaaacaaacacagttacgtgaggcatgcattctctttcataagaacagtcaaatatattttagcctaatctttctttctagatacaataaatgccgctcccttctggattaggcagatgacagcaataacagtattgcagctgggagtctcccaggctgacaggtgctggatataagatgccccagattgtcctgtgaagtacaggacatgctaggccctgctggatctgcccaaggagagggcagctcctgtgtctgttgacacctcgtttagattctcccgctcactcaaacagctgccagaggcagccgtaaaatattgcttaattatagaacttcccttgatcctctttatcccttccttctattgcatttttcccccttttgtgcctctctctagttcagagcacctttaggctaagcactcatgggagtattatggtggcgccttttccaactcacagttaaggcagagacaagattttcagtcctgcactatagctgtggaattattttcagaggctgtaatgagcaggtataggttcaaatgtggaatgcagcatcattttttaagcaggaaatgggttcattttggggggaggatagctttctcattttttttctgattagaaaaataatgcttattgtacaaaaagaacaaagaaatgtaaagatatgaataaagcctacttcccccttgttcatatgtgttctatttaccaaaacgggattatgttcactcccacaatatattttagcaaatacagatccatgtaatttatcatgtctgttcagtcttccactgtctgactgtaccataatttgtttaaccattctatcatcatacactaaagatagaaacaaaaccgctgtggacatccttaagcatacattctgcatacttgtattggtttggagtcatgtttgtgatttacagggatgcgaaatgagatcatttatttctctaacattaaggaaatctgaattaaggaactcaagagctggtttgctggctccgctgcacctttctgcttagttgttcttactgagtggcttccattcctcataattccagctgtctgctgcagctccagccatcacgttcatatgccaggctggagaaaagatggaagggtgggaagcagaaacgtatgtctattgcttccgtttaaaaacctttcccagaagcccacacagcacttctgttcattgtctagaacttagtctcttggcaatacttagcacctaaaaagggagagcagatattccaaagcaacaaccatctctgtcattcccatctaattgttttctgggaataaaagctttgtgcaaatggacttactggatcaaagcttttcccaggtttttgttgcatattgatatactgctcttcagaaagatggtaccaagttaagtctagtaatatgcgagaataacccgccgtaagttttcaggttcttttgtgtgcattttatgggcatttttaaagctatttttctgaagctgcattttttcttttgtttattaaatcatacattctataaagagtgaggtggagattttactatttacaattttgtcttcaaaatctatgtctgtacaagtagaatattcattccaagcactggaaggacattttaatgttattcgcacgtatttcctctactcctaagaaaacttatttggaggttgccagttgaattaatacattaatcaaagtaaggcagctctctcctgttttgaaaaacttcctgtcaattaaatacaaggcacagtgtaaaagtggctctgcccaagttagtgtttagacagaaatgtttgtattacaccgtggtgtgaccatcagcagctccataaataaaggaatcatctgccggcgcttcccaccttttgggtggggtctgttttctccttcagtggaaggacattggggtcatcatcattactgctgaaatgttattactttagattttatcaaaaaacttggtgtcaccaggtctgaagggaaaaaaaaaatcaaacttttttctttttaccctcacacaccatccaacacagcacttccgattccctagcagacaccaactgggtgtcctgtaatttcattcaattctgacactacctacccagagatagtatcagatctcacaggctaagggcttagtcccacaagactgcaccccctccagcccacctttttagatgccaattgcaagctacaggtggtgacctgtgcttctgactaactccctccttggatttgatccatttgctagaatgactcacataactcagggagacacttcacttacttttacccatttattagaaagaatgttacaagggattcagatgaacagccaggtggaagagatacataggacaaggtacttggagcttccacaccctctctggatgtgccaccctccaggagccttcacatgttcagctatccagaagctctctgaaccctatccttatggatttttatggaggctttattacataggcataattgatttcatcactggtgatcagctcatccttcagcccctcttcccttccctgaaggttgggatgtggtgtgggactgaaagttcgaatcctccagccatgtggttggttccccctggcaaccagccccttcctaaggctatgtaggagcccaccaacagtcacctcattaaaacaagagaagttcctatcacccagaaaattccaagggattagaagctctgtgtcaggagccgaagtcaaagaccaaatattaaaaccaaagattctcctagcacccctatctacaagggttataggaactctagatcggcaatggtgacagagatttatttcttaatatatcacaatatcacacatggtttcccgatttggttattcaaattggtttatattagctttttttcatctttctttatcttgcgagtgttacagaataaaactcacttctcttcaaagttagaaaagtgaccagccaaaggattactatcactgagggatcatttagaaacaagtgattattctaatgctactaacttaaataaaaaaaaaaaagttggtgaatcagtagatggccgtgccgtatatattcttgcaactttcctataagtttaaaggtatatcaaaacaaaaagttatatacgcacaaatagatgttgattttatatgatttttatctgctactttcatgaagaaggatggggtttgaagtcataattgaaacaggtacatatttttgtactttgttaagtaaaaaattaaatcaatcatgtattttttattaacatccacttgtgggtacaaagatacttactgtttggagtttgcataaacatacttgtttaaaaacaacagcattttttaggctaaatctgtttttccattagttgaagtcatagaaccttcaaggcttcctgcatttctgtacctggtatgtcccctcacattttggaactattatctccttgtaaattattagaaaaattaaattagattaaaacttcttgagcatttctttattaggaaaaatggaaatccattacatattcttttgcttgcattcaatcttactgtgctttttactgcaagctgaagtcccctttctactttaaatgggagagaaaatcttgtgctgacatgagatgctcattaccaccaaggcactcattaccaacaagggcagtaaaggaatcgcagctttggctgcctctcacactgaatctgagagttgctattattagaatgcaaaaaaaaaaaaattgtggggtgctggtgggggaactatgtgagacttgtggttagctagacctgtgttttaagaatatttttgtctctgagtcaattgttacttaactactcgactatatgaaatcaagtatatcagccaggtgcagtggctcatgcctgtaatcccagcactttgggaggccgaggcaggcagatcacctgaggtcaggagttcaagaccagcctggccaacatggtgaaaccccgtctctactaaaaatacaaaaaaattagcctggcgtagtggcgcatgcctgtagtgccagctactcaggagactgaggcaaaagaatcacttgaacctgggaagtgaaggttgcagtgagcagagatcgttctccagtctgggtgacaagagtgaaactccatcttaaacacacacacacacacacacacacacacacacacgaaagaaatcaagtatatctgtagtttttgcagtaaattgatgtctaccattatttctctccattttcttgtgttcattgtactataaggtgtttattgattttttttctttttttgcatttgaattactcagatccctttaaacagtttggatagattttcacaagggaaaggaagggaactaatatttatagtgtgtcatgcatatccggcactgtgctaggtgctttacttttgttatttgatgaaattctcaaaacagcctcatgtaatggatgttcttatgcccattttacattggaggagaccaaggcttggagatgttacttacagtagtctcttagtcagttaatggcagaaacagatctcaaatccactgtaccactctgcctcatttgggtgatattttcgactgaagatgccaagaaatacacgtaaagaaacattgtaggctgggtttgaaatgtgaaccataagctgtgtttcctgataattattttcaaggtccccagtagcactctccccttcctctgaagcctaagttggtccctttcgatgcctcagtttttgtctttgatcctccaaataatttcttgcaaaatgggaacctcactctgaaaagcacctctagtctctcttgagatgccggggttcatgccagccctttttccagttcaagttgtgtcatgcctttcaaacatgtgcaaaaagaaagtggctctgatggccagagccagggtggctcatcctcttcccagaattgaaaaaaacaaaaccaacaaaaaggaattaaatctcttcacatgaatagaggagaagctagcctaacccaaaagaatttttggttttaaagaggatttgccttcttttttgggatgagtgacatttaattcacttggccccattagaaagaagagaaaggagggcagtgcagctttagcttcgacatatttcacatttggagtggcttcggagcagccaagcactgggtcagtgtcccatttaagaacaactggaaaaaacaacatgttaaaaacgtgttaggcacagagagcatggaaaaacaattgtcaaagtattttagcatttagagtagcttagtggctactctaaaatactaacttctttttaagacttattgtgagattgaagctgattcctagatgttagatgcagttgatatgggaaacatttctaacatacagctgttgagacagagtgtcaggctctggaccatttataataacaaaaacaatagagtctgtgctgtttaccaccatactgctcgttgtttcactgccaccttctccctgctcatttgactgccagctccttgagggcctaggtattacaggcactcatcaccgtatgcatgttgaagtgtcgtgaattcatcactgagtgcctagcaaatcccgacatacatatttgggtacagcatcacttcatctggatcttgggtgtagaaatagcaccatattctaaccctggaagaaactggctgcattgggcttactgaaagataatataatgtacacaaagcctagtggactgtatattcaaaagtttttcagtggtaatttttaccacactccacatttgccaaaactgattttggggagcagagcaaggtggcacgcatgtgtagacccagcctcgggaggctgaggcaggaggatcacttaagcccaactgttggagtccagcctgggcagcatctctttcaaacaaaagaaaactgagtttggaactgaatccctatggaagatgtaccccactgtaaatacttgtctaatgaaaaaatggatgaatacattccacttcctattaattattctagaattcactattcatgtggctgggcgtggtggctcatgcctgtcatcctagcactttgggaggccgaagcgggtggataacatgaggtcaagagttcaggaccagcctggccaacatggtgaaaccctgcctctactaaaaatacaaaaattcgtcaggtgtggtggcacacgcctataatcctagctactcaggaggttgaggcaggagaatcgcttgaacctgaggggcggaggttgcagtgaaccaagattgtgccacttcactccagcctggttgaaagagtgaaactccatctcagaaaaaaataagagtaataataattcaccattcataaagcgtctcatcttttctctacttctgattctcatcccatgtttttgtttgtgagaaaggagaaaagtgaaataaagactctaccaagtacatattttatacttgacatctggaaataatatcgtgaaatagactctcacattgttgtggagttccaacacaataaacttaaggtgatttatacatcttttatttattttattttattattatttttgagacagagttttgctctgccgcccacactggggtgcagtggtatgatcacggctcactgcagcctcgacctcccaggctgaagtaatcttccgcttcagcctcccaagaagctgggaccacaggcatataccaccacgcccgactcatattttgatttttttttttttagagataagatctccctatgttgcccaggctggccttgaactcctatgctcaagcaatcctcctgcctcagcctcccaaagtgctaggattacaggcgtgagccactgtgtctggactatacattttttaatagcattattgatcctggcatgagaggagaaaaaaaaatgctggtactaataataaaattgtttgcaacgcagccaaagttctttaatatggctcttggcccaaatcaaacaagcaacagaaactcccagtccttttttttttttccttcttatgttttcacaaaataggaaaaatgaggttaagcaagaattttgctcagtttgcagaggcaaagtgaggcttgccagggccgggtgctgttggggtgcgtgcagcatatgacggggtgtctctaacacagtgactgaactgttcaccttctgaagtgaggctcctgagtcacacctggggctgtcttgatgagtcaccagccttccaaagtggttttctctgggaagtggcacttcacagtgccacttttttttcccaccccagggacaaaactctggtaaatgaatccctgcaggaaccacgggtattacagtcctgatttggctcatctgctctttggggctgacagcagctttgcttgactcagcttctgcctgactgagtaggttcagacagaatgagtctgcagaaaagtcggtggtgctcagtgggaaggacgtgagggagatggatcaccacagctggccagggcagaggcactaggagacctttcacatggctgctgtgcctactgctgctaacttaaacaagtggaaacttcttggcaagtctgtgagggaagtcgaggattagagcctggtagttaaaaatacaatccctgccattcattcagaattccagagaatgctgaaattttttgaattggcaagtgaatggtagagaccggaaccatacactgaaataacttctctggtcttgtatcatcttttattagaggatcctaaaaaaatcccctatttatatatcagttattatttctgtgtcatagactgcagctatgtttgatgagctgcttaagtgaaaatctgaccggaaactttcaactataaattctttgtggtttcaaagaaggatgaactttctcatctaacacatttctgctgtgtgaagagtcacctttattatatggcatgagtctttttttttttttaatagctttggggtttaaactctgaatgctttgctaatagatgtgtcagctgtgcacattggcagcttgacttttacctctttgtatcttctattctgatgcattaaaaatagcaggagatggtgccgtttaggatttgggcagaatggaagaatcattataaccaataatagtgttttaaaagctgccttgggacaaagaattattaattagggtggtagaaagaatgacaacgtgggaggaagattgattagggtttctagaaatacagtaaaacctaagctatgtatctcttcaaccatgtgaagagctattactttatttctgattgtcaacatatcgaagttcaaaagccgactccacattatgcaaatagactgataacgttaagcagaggagatcaatgtactggatggctactaatcttaatattgtcgccaggcgcggtggctcacgcctataatcccagcactttgggagcctgaggcgggtggatggcctgaggtcaagagtttagatcagcctggccaatatggtgaaaccccatctctactaaaaatacaaaagttagccaggtgtggtggcacacgcctataatcccagctacttgggaggctaaaggaggagaattgcctgaaccggaaggcagaggctgcagggagctgagatcgcaccattgcactccagcctgggtgacaagagcgaaactccgtctcaaaaacaaacaaacaaacaaaaaacctaatcttagtattacaaacatgatcaggtcgggttgctagtttagatgtgggtggtgagctgagcatccactgcgatggggcttctactgtcatgggctccctctgtgatgtggcctcccttctgtgatgagctccctggggtttctcctgcaatgggctcccactgcaatgggcttccactgtgctcagctcccattgcattgtggttttaggtgacagcagagggactacctggagaaagtgtgcatctgggcctgggagaattagtaagtgtgcataccacccctgtctttgttcttgtggttaagactcatctctggtgttggttagcagagctaagtaccgttggcaaaacaaaaggtactactaaaagaaatgtaagatatgagtaagatatatgtcatttcctaggtcttgaaatctaaataagatcacactaatagaatgtttaatttgatttaaatgcaaacagtatttatccccaacatacaacgagaaagtaaaccaccttttgcatacttgtattctaattccagttgaggaaaattttaaaagtttaatataagtcttcggcaagactccttgccatctggtacaggattaaaaattggcatagcatttgttgtctactgacagtgggtcagatttacttggcaggccctatctgggaatttatcaacctcatccaaatctgtttcagtttccatttttaacactagtgggtctaattggactgagtcacaagaagcaagttgcaaagctgtttcatttagcaaattttaagctaattgtcttcagtatgtacatttgttttaacattaagaggatggtgaattggcctagtaaatcaaaaaagttttaaaaatctgattttctgaaataagacagtttgcttatacttaaatggggattgtaaatatcataggcttggcagctttttttcttttttgttttttaagagctagggtctttttatgttgcccaagctggtctccaactctggggctcaagcagtcctcccgcctcagcctcccagagtgctaagattacaggtgtgagccaccacacctggctagcattatctgtggaacatttcttctggaagagcttgtattctactggaagagaaaaaaggaggtagtaaggacagaggctacagaggaatttcactgaggggatgaagacagggagcagtgagtatgattgagttttaaaccagtctgccttggttttatgaccccaggctgtctttaaattctcatctcattggtgtggttctctttaactgctcagctaggttgtggcaaaagaagaggcagtttggaggctgcttccaggtcccgtcctaaccactctgctgatggaggggagccctgatgtctgacactgtatgaaactctcatttattaaataaatggtgggcagaaaaaagacaaaacacttatgtttgaagacaaaatctttgcccatagaaataagcaacatgctgctaatagttttaaattctttcaaaatgaagcacttgtaatcattcctatttttatatctttgtatgcttccagcaatacaaaatacattacatgggattctctatttcagaaagtccttgttatacggcttccttcatcataaagttagtgtgggtaaattcatccaaaaacaccaggccttttcctgggtggtaagaagctggaggattctattttattttattttttttgagatggagtttcactcttgttgcccaggctggagtgcaataatggcgctctctcagctcactgcaacctccgcctccccggttcaagtgtttctcttgcctctgcctcccgagtagcaccaccatgcctgtctaattttgtatttttagtagagacagggtttctccatgttcgccaggctagtctctaactcccgacctcaggtgatccacccgcctcggcctcccaaagtgctgggattacaggccactgtgcccggcctgattattctatttttacagataagatttttatctttgcctttactatgtttgcacaatgtttttgatttttacacctaaccagtacatcacccatcatgcataataggtatacgatctatggttgttgaaaaaacttgaaccaagtgttgccaaccttggaaggccagagctgccttctctgcactcactgctgagtgagtttgggaagccaggagaactggccatgaaatctgtaagtgactttggtggtcataatattcccagaacagacctgctttatcctcacagtgaggaaccagtatattgttagcttttttacccctgtctcatgcatatgggtagtgtgactaggatatccaattagatcacacagggtcagagctaatattaaacccgggcacccaggtatatgtgactccacaactgcgtgtggtctttgcagagcccacagagtctggcagtaggctgctgtgtctgggagatgcctatgtgagttgtgctgttatttcatgggccatggtgacccagggggacttggataccaggtgtccttgggatatgtgcctggaggtgagatagtgaatggattgtcaggcagagagggtggggggagggaaggaggaagggaggaaaaccagaaagattggcagaagggaagcccagaggccattgccctcatcaaggtgaaaggtcatgaaggaggtagaaggaggtagcagtggcttgagaggaggaaactggagcaaagttaacaccccctccgcaggctgatggggaggccagtctgaggggagggtgacttggagggtgggagtgccaccccaccaatttcaaaacattttaaccccaaacacacaatttacctgttaaataaaatggctttctacatttgcgtctttctggaggaaaatattaatccatgagggaaaactgatttcacacgacatggtttttcataacctaccatttccagccaaatatcttctcagagacgtggtgacctttcttgccccttagcaaactccatgcttttgtccaacctgggcagttctctaagcagagactcataatgtaattggaggccaggaattggttggtctttctgggactgagagaaggaggctgtctgggaagtagtggtccaaggggctcttgaaggaaggggaaaaagcccactcccgcttatatttgttacaggtaccgttaaccccacataccaccagggctctccatgggaagcacttgtagaggatttttcttttttttaagtcgaggaaaaaaatgtttactgtcaagaaaagcttttcttccccgtaggaactgctattctttttctttataaacagcatgggatcaggtgattgattccatttgtcccctgatttgagccacacgaagataggagccaaaagtgtagtttatcttcaggaactctttttgtttgtttgtttgtttgttctttgagactgagtttctctcttgttgcccaggctggagtgcaatggtgcgatctcggctcaccacaatctccgcctcctgggttcaagcaattctcctgcctcagcctcctgagtagctgggattacaggcatgtgccaccacagccggctaattttgtatttttagtagagacagggcttctccatgttggtcaggctggtctcgaactcccaacctcaggtgatctgcccacctcggcctcccaaagtgctgcttataccttatgacctgtgtattcatgcatcaattttcttttttgtctttttgtaccttcattagtatttttgtttttactggttgtgaaaacaatacataatcactgctaaaaatctggaaagtacaaagcagtttagataagaaaaaaaaaattaccagtgagcctgttatttgcatatatcaccataaatagtttgatatgtttctttttccttttttgttccattttcaaatatgaaacctgtacagtgtatgtatttatacaatacacatatataggcaggttaaatatatttgtatatgtgtgtgcatttccaagggaagttatacttttaaaacagcagagagtttttcttgaagtagactaagcaagggagtgaagccaggaaggaggtgggagtagcggggaagtggggattaatctagctaaattgtgggtcctggcaaacactgagattacactgtgaaatacgagaaaggaaatgactcagtaacattgagagagggagcagagatgagacagcagagtgaaagagtgaatggcgtatcctgggtttgggaagtggtgggaagtagggggagctggagcctgaggcactaagtgattagaacaataggagaatttagttttcagatgaaatcatcaaggctgtattaagtgcctcttgtgagcaatagctcactcttacttgttgcattcagcctgggagccactcttgacaccatgttagcgcagccttacagctgatgtcaggtcgactggtctgcagagccaggaatttgggctttcttctcagagttgttttggagcaatgagaactgctcacttaagaaaggctccctcttgtactccagcctttggggaatgctgtgagtgacacttttaattaacaaatccactgggaacaaaactcctttaaatgtgttggctgggtgtggagtttgaagggtgggccgtggaggctcccactgcactgcaggagtgctgggacttcaagccatgggtaagctcggtcagaactgtcaggatgaggtccacccagaaggccccacactctgtcccaggggatttaggctggcaagctgtgctggcactcctggggcaagatgagctcatctgccacttcagatgctgggcttcctatgctagatgttcctgctcttgccgcattcaggagccacagcccacttgttcagaacgggaggggagagtgggggacgagcatttaggaatgcatcattccagctcctgtattattcctagagctggtagctgaaattctgaccacggaagtgtccttgaacatcttccagcaaatgatgtatatttccacatctcaccggggcctgtgctgatgttggttctagcacagcatcaatatccatgatgtcagagagtctaagaaaggtttatgaaagagagaaggattcttttccttctggtaccagagtgaaaactatttatgtagcacatgtctgccttggaaaacatgctgctttaatagaatgagttctgaaggaataatcaaagcatttcttaggtctaattattttgctaaagggagttacttaattttgacatcctcatcaattagttcctcacttggaaggcctgtgacaagcctgaggctggctatgagtttccacctgcccagaagttgatggattttatgaaagctttaaacagaactacaattgtgaaactgaaagtgtaaactaaaactattgtttttattattatttactttatacttagggaaatgattttcatctctttacttcagtatttccccatcttttttttttgggggggatggagtctcactctgctgcctaggctggagtgcagtggcatgatcccaactcactgcaacctccacctcccgggttcaagcgattctcctgtctcagcctcccgagtagctggggttacacgcgtgcatcaccatgccggctactttttatatttttaatagagctggggtttcaccatgttggccaggctggtctcgaactcttgacctgtggtgatccacccgcctcggcctcccaaagtgctgggattagaggcgtgagccaccgcccccggcctttttttttttttttttaatcacatttattctaaaaccttagacctttagacccaagttttcacgcaaggcaatggatgagttccccttggcaataccttcaagtcttgcattaagaaatctgaataacaattttagcagaggaagcatttaaaaatgaggagacagactgaaaagaaaacaagacaaatacaacttcaatgcaaggaagtttctagactgattaaacataacgaaagtaaaagtggtttcctaccttaaagattcaaaggaggccattgttattcaaaagtgaggtgtgtttaacagaaacaacaatcatgctccttttgttgtatgtctaaggaaggtcaatggtgggggcctgactggaagagacccacctggttgtgaggcccaaaacaaagggctaacattcagtttcttctatcatgtttgttgtctttgatggatatggaaagatctctgatactgggctgggtgcggtggcttgtgcctgtaatcccagcactttgggagactgaggtgggaggatcacttgagctcaggagttcgagaccagcctgggcaacataaggagacacccacctctacaaaaaaaattttttaaaaaaaatgagccaggtgtggtcgcaggtgcctgtggtcccaggtactcagtaggccaaggtgggaagattgcttcagcccaggatgtcggggctgcaatgggccatgattatgccactgtactccagcctgggtaacagagcaagatcatgtctcgaaaaaacaaaaaagaaggagaaggaggagaaggaagatttctgatactgtttataaaacaaagtagaggaacgggatgaatctactcatcatatatatatatatatcacaaactttcactaaaggaagagtttgatggagtgggacagagtctctaaggtaccaggagtgacctgcaatgtgatttggaaggtggtaggcaaagctggaggccatgtccacctttcttagaatgtactggaaactctgagcagaagctcatgtttcatgttgggttagtttctctgtgattaagtcacagtaacaaactggaagttgtatgtgatcaaacatgtaatcatgtcttctcccttgtaaaccttcatgcctcaatatctaagtttctccataagctggcactagttgactttcctactattattttctaatactctgccttccagctaccctattgtcaccttgcttggtgacagtgagcttcttgagggttttatgtgtcacctttggggaccttgaaataccttacactcctactgtgagagctcactaatgtggtgttcagaagctggtttcatgggcccatcttttgcttgatgacagccaaagggatcctcattatgtcaattctatgagtcaggagagtatggggtactggctgggaaggtgagcatggctccccttccaggaaggagctcacactatggcactccagtgattggatggctgagaagcaactgaggtgctggggaatacaagctccacgggccgaggggaagttcactggggctcactgcatgcaagggctgtctggacagcgatgtcttgggcttgtgtttagagagctgcttgcagaatccccagtgtggcctaaccaggatgcagggaaaaataggcaagtatgtccttggatgaaaccaagcacaatctatcaaccactcaagcagatcctaagggaagaattagtgtcattaactattatgctgttgttggtgatgatgataatgatgctgacaattaaaaagataattaattgttttccttcttttagtcacatagaaaaaatcaccacatggcaagaccctaggaaggcgatgaatcagcctctgaatcatatgaacctccaccctgccgtcagttccacaccagtgcctcagaggtccatggcagtatcccagccaaatctcggtaagcctcaagcttttttaaaattaaaaaagatattttttttttgtagagttggggtctccctttgttgcccaggctggtgttgaactcgtgggctcaaacaatcctaacacctcagtctcccaaagtgctgcgataacaggcatgaaccactgtgcctggtggagccccaagctttgactccaagctgaagaaatggtgttcaatcaaggggtggcggggctcataagtggttctggctgtttctatgtctcttcatgcacccagacggtgtttgctccttcttcttggctgcaataccgtgttacccttctgccggctttttcttctttacttggtctctttaccaccaactcatgatactgctgcctcagttttaaactacagttctgaccttccctccaatggccttaattggggtagaaaaatcagttaggcctcctgtcttcatctagcctgaggcaagtaggacacatacacgctttgggtgactttggctcctggcgactgcctacaggtacaattctagtctcaaatccctatccttatttcccttttttcctttttttttcataattgctgcataacatgtgtcagatagcatgccaagtgcttccatgccttaccttatgaaagccttccaaaacccctgcaaaaagtagcaggctctccagtttatacatgaagaaactttccgaaagtcttgcagcttgtggagagcagagctggagagcaggctagtctgattttagaagggagttaaccattacataacctgcaggtggcttctccccatacctgccgtgggataatatggctcactttttacttcatttacaatacttaataagtgcgattttagacttgagaagagaatattttctgctaaaattatccccactagagataatcaccagtgaattaatacactgcagcaacggaaccagtcagcttttttggtaatcattcccttccttctcccccagggctaaaaataaaaaagggccaattttaaagttttagaaaagttggtgccattttcagataacatttccatttaagatcagatatccagatatgctttatacacagaacagttaattttagggagtgaaaagaatctcctgttggattttcaggaatgaacaagataaaaatggaagcgttattcctggacacccttccctcatactgtggcttagccaaagtgagtatgaactcaagtagaccctagtcagcttcaagtgtcagttcttccaggaagtctgaacctactgctttaaagcttgcagatgtacagtttccaaaaagcaaatgacatggaacaacctctgtggagttccttatctaaagggcagatcaaagaaaatgcaaccagttctggtaccagcagtggtaaaccaaagcctccagtgagttattttgtcccaaatatacaggagctcgtgtagaaatcagatgccactgtagtaaagagaccccaaattaggtggcattagactggtttttacagtttgtttaaccatttaattttcatcgaaaattctaaaaactgattattaaagttttaactttaactttgtaatcaattataatcggaaaaaaatctttcatgaacccagtttacaaaaaaaaaaaaaaaaaaaaaagaaaagaaaaaaaaattcaaacacttcctccaatctccctttcctcagtccccaagtttgtttcctggagccaaccagtgtttctagttgtgtgtgtgtgtatgtttaatcatactaaggttagcatatcataaccactgttctgtatcttgcttttttcacctgcctgtccatacatatagagctgcttcattcttttaaaaatttgcctattagtctactatattaatatgctataattagtttatttaactaactcctatctggtagatatttaggttgttactagtgtgttgctagcatacaaatactggagtggatatcctttgtcatgttcttttatgcattctccttaatttttaaaatttgtgcgatatgtaggaagtggactaattaaaagaagcttgaatgcttggaactagatattgaaggcacatgtgagtctgcctgtatgtgcatacatgcatgcatatgcacacacacacacaaagtccaattgcactagtaaagtatatctaaagaagttgtaatctgaacattctgaaacaaatttacctgtagctcagtaaaataccttagtttccagatttctatttttatttaatttttgttattattattattattattattattattattattttgagaaagaggctcaccctgtcatccgggctggagtgcagtggcacgatctcagctcactgcaacctctgcctcctggttcaagcaattctcatgcctcagcttccccagtagctgggactatgtgcatgtatcatcacgcccagctaatttttgtatttttagtagagacgggatttcaccatgttggccaagttggtcccgaactcctgacccctggcgatccgcttgcctcagcctcccaaagcgctgggactacaggcgtgagacccggcacccagcagtttccagatttctaataaggcagtgaatttctcaagacgcacattctggggtttttccaacaatatttgtgtatttgcccattgcaaagtgtgtttctagcttatggagaatcacagatgtgtctgaaggatggaaatacaacttggaatgccaagtaagttccaaagaccaggacttaatttagagagtctcaatacagtcagaataataaatgatttactcagactatttcatttcaagccataactctgcctgtggttcatagtctttattatatatctttaaacatataaaaataaaaagagcagagctgggtgtagaggtgcatccctgtagtcccagctacttggaaggctctgaggtgggaggatctcttgggcataggagtttgaggccagcctgggcaacatagtgagacccccaactcttaaaaactagaaaaagaaaagagcagattcttctcctcccactcttccttcttcttaaatctagaactttggtacttttcaatggaatgtagctgtcaaataagtgaactaaagtgataggtcttctttaatgcaaggcatttatatacatgtgaaaaggatgtcaaaatacagttaatagcattactatcagatgatagaatagtaccttttataactaattttatttatttctagagccgtgatataatcagtggcatagttaactacattcagaaacaaatcttgtatttggtccctgtatgtttctgtaggttaggtacatggacttgggtgtctgactgccagaatttgaatcctggctctgtagttactagtttggtgacccttaagttatttgtctgtgctttgatttcatcatatgtacaatggggattattaatatatgaggaacttacgagtttatatatgcaaagtgcttagaactatgattgccacatagtaagctaaaatatatgtttattatcattatttttatggcaaaaaatattttatattttatttaactatagcatgttatattttaagacaatttaactgttctttataagtgctttctagaataaaaatgatttattttgggctggttagattgcaaagtgttttaaattaggaacaatgtattcattaccttcagtgaggatagtgccctctggtggaaatgtttaagttacctctcccaggagaaacttcttatcactagacaccttattttttataagagctttagatgccgggcgcggtggctcacacctgtaatcccagcactttgggagaccgaggtgggaggatcacgaggtcaggagatcgagaccgtgatggctaacacggtgaaaccccgtctctactaaaaatgcaaaaaattagctgggtgtggtggcgggcgcctgtagtcccagctgctcgggaggctgaggcaggagaatggcgtgaacccgggaggcggagcttgcagtgagccgagattgcgccactgcactccagcctgggcgacagagcgagactccgtctcaacaacaaaaacaacaacaaaaagagctttagatgtattcctgtaatgcgacttgtaaatcaaaccatatttttattgcaagaggaaagacccattacttagtcatcctggagtgagtgactttgtaaaaacagaggattctttctgcaggttggcagatttgttgaacactgagtctaagtaaaatgaaataagctctgaaggggaaaattgcaaaaatatggtttttttttttttttttttttttttttttttttttttgcactttaattcaaatagccatctccagtttcgtctagcttaaaactaaaattttagtttttgtatttgccaaatcaggctttaccaatttggattctgtctgagcagagtaatggcctttaagcctgaattcccagacatatgcaataaatggaagaagaaaagacgaccttgggggactttagacttggctcactgcaacctccacctcccaggttcaagcaattatcctgcctcagcctctggagtagctgggattacaggcgcccgccaccacacccagctaatttttgtatttttagtagagatggggtttcaccatgttggccagggtggtctcgaactcctgacctcaggcaatccgcccatctcagcctcccaaagtgctgggattacaggcgtgagccactgcacccagccagaagtttgtatgttttaagtaggttgtgggccttccttactattaatacttactaaaattttaaaaaagagaataagagggaaacaaaagagggaaaaaaatagactgcctacacaggctctgttataatgtataaaacaatgggcttgagaaaatgaagcctgctgcagatcttagtccttggttagagtggtggcgaagtgggcatggaagtgggatggagggtggggactgttttggaagaacttgaagtcagaactgagtttctcttaatttagacgtttatgtattgggttatttaacctctgagtctcattttccttatctgtaaaatggtgataatgatagtacctatctgataacgttgttttgagtatttaggtagtccatgtcttggtacctgatgtatagtaagctgccagcacttgtattgttatagctattattgttagccagttgcctcatttttcctcccctttctggctcctgtgtaatcagaggaagatcctttgatatgctctgttagaaagccattccattcctccttcaggaagacccaaccatggttactgcaacttatatttgtttgggcacttttgcttacaaattgtgaaactagctggtgtggtaccaaaaaataacatttaacctcggacagcaattgtgagaagatgaagaggagcaagcttgtgactgtcaggtcattcacagagggagtttgtgaagagcagtcacacttctgagttctaagtgaagaacattttcccctctgcaagtagtgaagtgttagattttcccattcctcagcagacaaatactgaaaacatgcaacaacttaaagtagctccatattttaaaatgtttttaccaaaagaaagtgtcatgcttttttcctttctttttttttttgcctttttggtgataatcctagtgatcataaaccatggtgtgctgagctgctgtcacacactaatgaggctttttgttggaatgagaccctgacctgagatgctagtatccttcctgacagtacaggaaaaaataaagactataacaacttcaccagcctgcgaaccctagccaattcagaaacttttggtaaagtgcaactagagtgtattttcaatactataggaaatttttaaagttacatatacacacatgcacacacacgcacttacttacccctttgaagatgtgccatccaccagcccagagtctaagtcctccaggtctgtgtctcgagctgtacttcaaattataaacacatgtgtgtttttttttttttttcttttcagggcatacttttcaagacaagatggaaaatcttgtctgtgctcagtttgctaagttggcttgctgttctctctaggaagtatacaaagaggcttagcattgtatcaagagcaaataaaatagctaagggatatcgaagccctgggttgcttaaagcacttggaaagacatgctgaaagttcactagaagtcagatttctacttaggcatcttatgttttcctttttttccattagtttttttcttaatcaaatttacatggtgagttcacggcagacacatctggctactgtgatttttccagctctgatgttctcactgcttttggaactttgtggtttatgcagcatagattagcctaaagtgcaccggcacatacacgcacaaacccagagacaaacaaacaaaaaaatacccatacactttttgggagatggtggaagtgaagtgttgggtgttgtgggtgttgtaggtgttgtaggattgttgtggtggaaagtttgtgtttatggaagaaaaggaacactggtgggcacaggacagggggaaaggtttctatttaaaaatgattttcttgattaaaaaaaagaaggaaaagttttctaaacactgtagaaaatcaattttctttttattttgtagagattggggcgtctcaccatgttgcttaggctggtctcgaactcttagtctcaagtgatcctcccaccttggcctcccaaaatgctgggattacaggtgtgagccactgtgccctcaattttcttagattttgaggaagctatctattgtcaaatacactctagttaatcagcattattgaaggctaccttctttggggtttcgaagaggagattcttttttttttttttttttttgagacagagtttcgctcttgttgctcaggctggagtgcaatggcacaatctcagctcaccgcaacctccacctccccacaacctccacctcccgggttcaagcaattctcctgcctcagcctcccaagtagctgggattacaggcatgtgccaccatgcctggctaattttgtatttttagtagagacggggtttctctgtgttggtcaggctggtctcaaactcctgacctcaggtgatccgcccacctcagcctcccaaagtgctgggattacaggcacgagcacccggcctgaaaaggacattctttatagttcctttcttttacggtttttaaggaatatgtgaaatgagactgaaaaaaattaccaaatcaacggattgagttccttttatgtaataaagcaggacataatagcatataaaaaataaatcttatgttttcatggctatgttccacttatcttaatgtggatgagtctttattaagattaggtgatggagacttataggttttattatatgaaatttagaaatttaggtagaaaatttcttctttgataagaaataataaaagccatgaaaaatgtctgatgccacaattttccttaaaaaaaaaaagtagtatgctaggtgaatattttgggaaccatacacaaagatgtgttagttataatagccagtaaataaacaaatgcctgaaatatgaaaataaataaatttatttatttatttattttctgagatgcaatcttggtccgttgccctggctggagcgcagtggtgtgatctcggctcactgcaacctctgcctcccaggttcaagccatcctcccagctcagcccccgagtatctgggattataggtgcccaccaccacacccagccaatttttgtactttttagtagaggtaggttttcaccacgttggccaggtgagtctcaaacacctaacctcaagtgacccacctgcctcagcttcccaaagtaagtgctgggattacaggcttgagccactgcgcctagccacaaatatatttataagcagtgaaataatggatatagaccatgtagacacatggaaaactttgttgtaacattctaattttacacagcatgacaaattgtttatgctataattatacttctatttttttgaaaaacacattgcttagattctttccattttttcacaagactaagcttcttgaggacaggaacttgatctccatctgtgtatttctagccccaagcaaagctcattaggcatcataggtgtactcttctgtagaataaatgtgttgagtaagtcagttatgtatttttaaatgttaatagtgattatagttaagcctttgagttaagggtgattccctctattttctctgtaatgcggttatattacttttgtaatagccaaaaggagaaaaaaaaaaaaaaagagtgagaacaacaggggagaaccttgagctttttgtggtggaagaggagaacagtgtgttggaaaaaaggctccaggccccatgtgtattaaagacaaaaccaagaatgctcaggcctctgcagttgagcaagtctgcctgtggcaaatagattattcactagtctctaagatcagtgtttatccaagcgtggtccagatctaccactagctggatcacttgggggcatttgttaaacatacatttttagaatacagtggtttgtttgctcccaaaagaattatcctgggctgctgctaggaggaatatgccctggaaatttctgtgtcagtaaatgtagggtggaatctggaaaggtatgctgttttcgagtgctcagatgactctgatcatcagccaggtgtgggagccacaatcaaattgtgtatgttaaggccaagtgcagtgtctcacacctgtaatcccagcgctttgggaggccaaggcgggcagatcacctgaggtcaggagtttgagaccagcctggccaacatggcgaaaccccgtctccaccaaaaacacaaaaaaattagccaggtgtggtggcacacacctgtagtcccagctacttgggaggctcaggaaggagaatcgcttgaacccaggaggtggaggttgcagtgagccaagatggagctgctgcactgcagcctgggtgacagagccagactccgcctcaaagcaaagcaaaacaaaacaaaacaaaaaaagaattgtgtacgttagcacagtgatgggaaaatgccagtataataaaaatacaagaacctactcaatcgttcagtctttaatttatctgaaaaggacttggagtatgcccaccaactttttaactgattctttgtctgaaatagacatttactagggcattgacttttgtcattttggtgcttggtgttagtgcgcacatgagcattgggtaagtgaatgctgaagcggcttcccagagcatcttgaccccaaatattccaagtaaacttcaaaaatgaggaggaaaattatagcttgggatccagattcttgaaatgtattgtttaatccactgggtaaatgtacaagtctgcttcagttttgcttgcagagagtgggcctgagaatccatcaggccttcgtaagcctaaaccgtgacgaattccagagaagcacccccacacctggggaagagggaggccttttaggaaggtgaaggctaggtcaaacttgttttcttttttagtcctttctttgtttgcaccacattaattaattagttaattaattaatttgtaatggagtctaatttcttcaccgagctgtagacctctgttgagagttttaaaaataattttgacaattttcatcctgtttgctggctgacttccaaaagtttgccctcaggagcttccttgctatggagaatttcacccagttaagggtgaaaggcaggcagtgggattcgaggtggtttgtcattcagccacttgttccaaattgataagtgctgagtgatattttgacacttctctttgatctcctctttggcgtccctggtaatattgctcccgcctgtgtgtgatcatcacctctcccacccaggtaccaactgattgatttcttcttcctttctggaagtctaaatttattccctgggtgttttgcagttgctggtggtcaagaacagctgttcttccatgctttattctgaatagttctccaggatgaagtcagcaaaacaatatcatttaagtgaagcctcaggaaaacaaaagccttgattgtctttctccttaagtgctaaaaagaagatcacccctccccctttgtgtgtgtgtgtgtgtgtgtgtgtgtgtgtgtgtgtgtgtgtgtgtctgtattttaaggcagaaaaaaaaaaggttctaaacatttttgaagcagcaagattcaagaatgttatttttttccatattacataattgctatttggtcactgtagaaaatgctgattggcaaaacatgagaaaataaaaagccatggtaccattcaaaatgacactagtgtgttttcatatattttcttgactttcttcaatgcaaacataaaaatagttggaaactcctctatattcttttttgtagcttgtttttaatataccatgagcatcttcccatttcagtaatttttttttttttttgagacagaatctcgttctgtcgcccaggctggagtgcagtggcaagacctcggctcactgcaacctctgcctcccaggttcaagccattctcctgcttcagcctcctgagtagctgggactacaggcacacgccaccatgcccggctaatttttgtatttttagtagagacagggtttcaccatgttggcgaggccggtcttgaactcctgacctcaggtgatccgcccgcctcggcccccaaagtgttgggattacaggtgtaagcaactgcgcctggccagtaaatatttttctataatattttttgatgagttgttttaattagaaaagtaacacacgcatatggcaaaaaatccaaatagttccaaagggtatttatgaaaaattaggtctccttcccaccatgacccccagcccttttctcctttccagggaaacactactaccagcttcctgagcattattctagacatgctctacatacacatgcatgcttgggcatatacagtatgtctttttaaaacttaacatatcttagagagccttccaaattagtacttactgatttgttcattgtttgtcagcaatatgtaatgttccactccgttgagatactgtacttggtttaaccagtcctgtgtgctggatatttagtttattttctggttggtcactattactaaacaatgccacagtgtgcagccttggacataaatccttgtgccatatgctgtttatgtataggataattttgcagaagtggaattcctggatcaaagagtatgtacatttaaagtttttaaaactgttgttccatttctttccaaaaaggtataccaattgacacccctaccaataaagtgtgttttcttccccgtaccctggccaataatatctatgattaaacttatagcctttactattctgatagctacaaactagattctcagtatgttctttttttttaacttatgaatagacttggacatacttcttttgttcataaaccatcacatcatgttaatggctgcacagtagtccttttgtgaatttatttaaccaataatgccataatttatttaaccaattcttctattgagagacatataggttgattctattttttatcattataaatgatgtttcaatacattttcttgcacacacatacatttttgtgcccacctttaatttcctcacttttccagtttctttggaatgtttctgaataaaatataaacatttcttaaaaaatacaattttgacatggtttgcttttatcaaactaaggaattgtctaaagatcctggagcaggggattttttgcgggggggggtgttactttcttttaaaaaataatgtaacattaccacaaaaagtgtatttttaaccagccacctagctttcccactaactctgtttttcagcttgtatatccatatgtttttgactaagccataaatggaagtttcgttggaagttattttgcttcccagtacatgtcatgcatttcattccatattattttcgtccttttccttttcagtattatatttctcagataccagtgaagagtgagttgtgagttttgaattttgccaagacttaaatatttgcagcgctggaaagaaagaaagttaaaaaaaaattaatgtggctgatttagtcttggttcacaaggccttcatttagctgcttcaaagctcacacttcaaatgtcaagaaaaatattctcttaatttctgccgtatcaactgctgtaatgcctgaattaattagaatggaactataatttctctccaaatggaattggatcatcccatcctaacaaaacaaatgctcagggcggctccatgctggaggtttctggacaccttccctatatcatttctgcctgggtcactgcagcctagggctgccccttgggagacttctcttctgggatcctcagcatgtcttctttgcttgtgctttctcctctcctctgtgtctcctctagttttaagtacacattatatttttcctgcaatttgagggaatctcagtgtcgaaactacgatatattaaaatcagatggctttcgcctgaggcattccctatttcatatgtttgcattcactggtgccttctccatcctccactcttagcttgctcatttttcctcctatcaagaagacctaaatggagcaatgtctcagctctgaccctgggatgtaaggacctttcacaacagatctcaagcttgacagtcaactctcttggtgtcccaggtccttcccaagaaaacctgcaatttcctattctgggtgtctggtcctcaggggcagctatccagtggcgtttcttctgaaagacctccaaccggtctgttggggtagctctttgtcctgtcttcctaggctgtctatgttttaaaattagaatcatttaacagttggggttggggatagaggtgggaggctggaaggaactatgagtatgaggtatcagaattatgtagcacagattgcagctgggattctgttccatccaaattccaatcagttatcaaaagcattgtttaataggagtttcctcaaagttcaacagtgccacagaacaatggcccatacataacacagtttctctggtccctgccggactgagaattctgtctccaggaggtttgaggtatgtgtagagaggttttatttttttaaatgtcactatttattttgaaagaattgtaaacttacagaagagtttcaagtttagtctaaggaattcccatataccttttccccagatctgcctttgttaattgtttgcttataaacatagccacggttgcatctatccatctatccatctatctatctatctacatatttttttttctgaaccatttgagacaaagttggagacatcattctcctttacccagaaatacttatattttctcaaaagactttttctttttttcttttttcttttcttttcttttttttttttttttttttgagatggagtcttgctctgttgcccaggctggagtgcagtggcatgatctcgtctcattgaaacctccatctcctgggttcaagcaattcccctgctgcagcctcccaagtagctgggactacaggtgtgtgccactacgcctggcaaatttttgtatttttagtagagatggggtttccccatgttggccaggctggtctggaactcctaacctcaggtgatctgcctgccttggcctcccaaagtgctgggaatacaggcgtgagccaccgtgcccagctggacattttcttatataagcacagtgtaggtatcaaaatcaggaaatttaacattgatacaatactcttatctaatagcccagattcgaaatgtcttcagttgtcccggtgatgtcctttgtggctatttttgtttctggcccaggatgtgattgaggatctcacattgcatttagttgtcctgtttccataatctcttctaatttggaacaagtcttcggtccttgtgttctggaccttgacatttttgaggaatatataggccagttattttgtgaatcatttttaaatttggatttgtccggcatttcttcgtgattttggtttaggttataaatttttggcaggaataccatggaagtgatgttgtgttcttctcattgaatcctatcaggaggcacacgatttgttccactataggtgacattagctttgatcacttgatgaaggtagtgtctatggaaggtggggtgggggcagcagagcatgcttgtgccaaatggctcctctaatgaatatgttctgtaaagctaatgaaatatgtggaaaggctttttggtctaccaggtctctataaggtatggcctaaaatcatgtaaactcttcccctcgggatgactaacaagtaaaatttccaacctgctcagttaagcttcacagaacattatttatttgacacataatatatctgtgcagctatatacacacaggtaggttttttttttaatttatttacaaaaggtaggctatgtttattagagtcacaagcagttgactgtctcagtgtgactcaagaccacaaaaaacccatttctccttcacttcattctgagtcctagactggcaggtgtactgcttggggcccattcacaggtttacaagtttctcattgagggcaatctgtgactgacacacgagtagttttaaaatgaaattatgatgcttccattcatttgttccctactcttgcatcttaaaaaacatataattcttttttttttttttttttgagatggagccttgctctgtcacccaggttggagtgcaatggcgtgatctccgctcactgcaacatccacctccctggtccaagtgattctcgtgcctcagcctccccagtagcagagactacaggcacacaccgccacgcttgtctaatttttgtatttttagtagagatggggtttcaccatgttggccaggctggtcttgaactcctgacctcaggtgatcctcccgcctcagcctcccaaagtgttgggattacaggggtgagccactgtgcctggccaaaacatgtaattcaaaaggataaaaataaataattgaattaagttggggtaaaggactgtggctgagaaaaaaagccagggaaaaaatgcataccatggggccttgtgtggttgctagaggtacctacagatttggctgtgagattcctgggggatcttgtaaagaagataatatgctctgttataggagtcagatcactcaagagataaaggctttcatggtgttgaagagaaatgtagtttttctagacacagagatgtaagagggagttctcctgtacttccccgtaagtcatctagactctgtgatctaggggacaatgtccttaaaaaagaaattacagtagtggcctggcacagtggctcacgcctgtaatcccagcactttgggaggcccaggcgggcggatcagctgaggtcaggcgttcgagatcagcctggccaatatggtgaaatcccatctctattaaaaaatacaaaaattagctgggcgtggtggtgggcgcctgtaatctcaactacttgggaggctgaggtaagagaatcgcttgaatcagggaggcggaggttgcagtgagctgagaccgtgccattgcactccagcctgggtgacagagtgaaactctgtctcaaaaaaaaaaaaaaaaaaaaaaaaaaagaagattccagtagggaacactaggagttttatggggaagttttctatagtctttttaaatactgggtagtggcatgatctcagagcaccagccagtgttcacagaagaccaaaatgagtgtatactacatatgcattttgattcaaggataacatttagaaaatccagaactgtagtttttttgttgtatgttttgttttcatttttaagaaggaagctccttttgacacaccttctcaaataaaatttagagctacaggcttttattttgttttgcttgggatcagaatctcctctttgtaagtgtttaaaagcagagctgctttggtttctgtctgttcccccatccttgccccaaaccttattcctttccttcccaaagatcctgaaccactttacagggctgagagacaacaaaccgagaggcattgatcccaaggagtggcctctttccttcatggtttgtttgtttgtttgtttttgagacggcatctcactctgtctcccaggctggagtgcagtggcgcgatctcggctcactgcaacctccaccttccgggttcaagcaattctcccgcctcagcttcccaagtagctgggactacaggcgcgtgccaccatacccagctaatttttgtaattttagtagagacggggtttcactatgttggcaaggctggtctggaactcctgaccttgtgatctgcccacctcggcctcccaaagtgctgggattacaggcatgagcccctgcacccggcctgcttcacactttttgactcacttcactgtgtgcccccagagtctctggatttcttcagaattttaaattttaccatagagtgtgaaataatctggcagtttcccatgcagtccaggcagtcagctggaaggagatttctatcagtctggaatagaggccaaccacagtgctcaccacaggcaagaggcctcaagggacctggtcccggcccctcaccctctgctcctcagccacatgggctgctctgattttgcacaagtactccaagctcacagtttccaccttaggatctttgtacttgtcccccaccctgatttccatacttcattcagatttagagcacacatcactgcttcacagaggcctttcttaacttccctgcctaaaatagctccacatttctttgttcaaatcccttatcactaaaattattctgtacatttgttatagcctgtcttttcgttagacgataatctcctacagggcagggaccttgctgtcttgttcatcattgtatctctacttcctagaaacaggggaaatgaatagctaggtgaaccgtagatcattggaaagaaaaaaaatcatctatagttctataagcgaaacaccaccactgttaatattctaatactttttcatttcaaaggtaattaactttttgggggtcactagaaatcctataagatatatgggtacagtcctcaatgaaatgcatatttatacaggtttccaaaatttggcatatacttctaccagatttcctaatcctgttacccctggttacattcttctttcgttttttttttttttcctgagtggtcctggcccaatgcaaagcacctaaaccacactattgtttttgcttatttgattgctgaaaaaggctgtttctttaatttgcattagtgtgattccttacgaagctgataatttgccatattttattactaattgcatgttctcttttatgaatcgttcaagtcttttgactacctcttggaatcttagtatctgttacatgatctccataataaagatgtttactaaaagggcatgctattaaaaaacacatgcacacattaaaaactagcaactcacgctggcaacttttcttccattccgtgtggaacacagctgtagattcgttttctcttagcttgggcaactgccatacttcgcacctggagtagttttaaaatgattcaggaaagctaaccaataaaaagctacaataaactctctactgactaaagaaaaataaatgcatgaatcagagtttccatttcctgctggataaaagtatacctattgtctgaagataacaaaacagttgtagttgtactgctattgcccaaccatggaattatattcaaaatcacaaggacaactttgtgaagcagcaaagtgaataactaaatttcctctttttcacaggctagataattgtttttctaaattcactaactccatagaggtgcttcctgccacgggccacttgtgataaatcttgagatatccctgcaatcaaatggagtcagagtagcacattctgatgctgctttaggtggaagaaagagttctttctttacaggaaaaaggatccagaagaaatcagcctgccagaaagatgtgatttttttttttccctagacttccctggatatattataatgatgagaactaatgtctgaatcctttaaatgccaataaaatatacatttggggtaatgcagttattatgaaaatataaaagccagtgttacaggcatttctattttacacctgaaaaaggagagttgcctagatacttgcacactggtgtgtggactacattattgtttggatgggcaggcaggatagcaagtaggaaaatcatttcctggtgctaaaaattcagggtttcctgtgaagtaaacgaagcttgggttacaagtctaaaactagacaggcttggggcatctggaggaccggaggcccatctggcaagctttggggcacctggaagtggttttaaggcttgaaacagtgaagctgggaaagtgtggctgaatcaacatatattccagagctctgtgccttatcaactgagccggctgagaaatttccttgcagttattctcacccagaattggaataaagggctcagtgtgaagttgggatagtacaacttctcggtttaatactttacagatttttggaaccaaatgcaccctgaagtgaaaagctgctttttttttgctgaccttgttggatggctaatactgtttctgggaaataagagaaacaagcggctcattgttggcaggagctgagagagacacaaggagggcgagagacgcgtctgcagccctttttttcccttcattgtatcgtgactgagtcaaggctggattgtggctgggtttttcttcctacctctgtagacatatgttttccatcagacagggctgcgtgacacctgacgttggccagttcacatgagttaagccatggacggcgcataaacagaggaaaagacccgcagctgcacccagacactcttgatgctgaaatatttttcaaagcttgatgtggctgggtctgcacataagtcagaaacgatttacacctgtatgttttggcttgcttctttcagttgcatatcattattcccacaaagcctctatggccagaaggtctaccattggctgatggcagcacctctccttcccatatataagcctttctaaattatgaaatgtgagttttcaaagtttatttgatttttgtcttttttttttggaggattgaagaacaaaatgctctaccatttctataaagtgaggtcacacaaatggtgtcatcaaaacatgcgattcacgttgatcccatcattttaaagtaaataagttaattaaaatagtctgttagactttttcatgaaatagggaaaaggaaacactacttggcctcatcaccaaatttaacttatcacgtatattttgatgactacgaaaaaggattgggcagtgattggtgatccgttggtgatcattgggcagtaattggtgatccatgcagctgatgccagctgtagtattctagcaggcgttccgggtttcctaggtttgtcgcagcctgttcctgagatctgggctgaggcatttaatcttccaatattcttcatctctaaaataactgaattagtctaaatcattggttttaaagtctgtcccaaagtcccatgctagaatctcagggggatgtgagcagaagctaaccttagtgttcagtttccaaaagctgggccctgttcaatgtgttttaaacatttgtttaaagtttcagcatgacacttgagaaatgcctgaagggaaagcagagtgaaagcaagaccaagatgatttagagaagacagtcaaaggtgctgactttaagtgctaatttcctcagctgatgaaagaaccctgggacataaggatagcctctgcttcaagccgtacacttggctctggagaaggattctactactaaagaaaagtttgagaaccattgctctaaatggactaagacccttctatcctgaatttctatggtgatagcacaaactcgggtaaatacatggccctcacctataatgagtgctgtggggaaagtgatgagtttgtaaatcatgtgtgaaactcagaatgaaatggggctaagcaggcaactatgctctggaagtaagaggaagcagcaactagaatgtggtaccctttggatattcccctatgaaactctagaggtaagggttaaaatgcatcctctagagaagatgagttatgggtgaggcgttgccagtttttttctcagttctcatcttgattatgtttctatttgaaatttaaaaagcctatgatgatcatcttgctataaatggaactgatattttgttaccaatttctaacctcccttaaccttactttggggagaatgtatttagtgcctactctgtgccttaatcagatttgaaatgcactaaaattatttttgttccatttttgtaagaaaggaagatccatatcattgtgattggtcctgaggggtagggggagactttgctctttcccaggtcttgtttataaagagcacaagtccaggaacatgagagttagttcaaatcacaggaagagaatagttcaatgtttcttaaaagagctttacttcagatgtatggctcaaccaggagtccaacaggaaaggttttcctgacttttgcatttaaccaagtgcatgtttatgggtgatataatgcagtcataaaataaatgtcataaatagtgcttgatttccttcaaaaattacagacaaaatgagtatgtaatattcccattccaattatcacataatatggatacaaaaggacaaccaccaatttttaatccaaggaggacacactgacagctaatctggatagcctgacagttctgaataatgaaaggtcattttgtactggctcctggttctctttttaagggaaggcattagggtggaaataggaaatttgagttctgctgccctgagttagccctaggtctatggatggccataggcctggagtgaaaaaccatcccatttgcctgggactttcccagatttagcactgtgacctgtgttctgggaaacccctcagtcccaggcaaaccaggataattggtcaccctctgtgacagagaagaagagaatgaggtgattgtaaagctttgcattctaacttttggaagcttttatgctcccctctcatgttgggtttaggttcctggaaagtgtttctgatgaagtttatatgaacttactggcccaaatatcaaactgaattaaacacttgttccaaggaggaagtttcccagatgccatatcaagtgtattacccagtgtatgcctttgaatgttgcatatttacctattttgaagagactgcattcaagttttaaaaacaatgtcagcctctacctgttctactcttttttttttggagacgaagtttcactcttgctgcccaggctggagagcaatggcgtggtcttggctcaccgcaacctcctgcctcctgggttcaaacgattctcctgccgcagactcccgagtagctgggattaaaggcatgcaccactatgcccagctaattttgtatttttaatagagatggggtttctccatgttggtcaggctggtctcaaactcccgacctcaggtgatttgcccgcctcagcctcccaaagtgctgggattactgcctgagccaccgtgccggctttacctgttctactcttaaaggatgatgttagaagtgttatttggaatagttgatgtggttttattatagaagcaagctttttaaagaaaaaaaaaaactaaaagatagataatttggaatatatgtaactgaagttaatttagcaaggctttgctaactacctgtgaaaactgatacggaagttaagccatctttgaaattttctttttaaatcatcacgtgcttatggaaaatgtcagcagatattcaagcagtcttttataacccttgcttttcctgtattttgttttgctttgtttttctattactctgtatcttgaacagcagtccctcattctaggcacatgaaactgctttgttcaacattccctgtccgcttttttcccttctctggctccgtgtcctaaacagcttctttaattaattttaaagagctaagcacacagtagggacttaatataatattcattcatatttaatttataattcagtactctgccaagacatccactgagttacagtggaccagcatttcctagtattcctatccagaagaatatcagccttgcaagtttgagaaacgagttgttgaattcatatatctctttcagaaagtcttggtaccccctattactctaaagactgacaaatcttccaataaaataaattattttaactttctttagcccaacatttcccagtcttattagaccagggaacacttctagaagcaatttaaaaagttttagcttaatatctatttattcccctgggacacattatagaccagattttctcttaaagattgtgtccatttgtacataccccaaccattgactattaaattaatattgactattaaaaagagagtagccagcaaagttcctggtattcactgggcacgttaaaatttgctgtttttcaaaccagttttagttttatattaaaattgagaagagagttcctatacactcactcacccagtttcccctgttgttagtgtattacattaatatgctacatttgttataattagtgagccagttattattaaatccatactttattcagatttctttagtttttatctaatatctttttctgttccagagtcccatacagaataccaaattacctttttgttttgttttgttttgttttttgttttttgtttttttgagacaaggtttcactctgttgcccaggctggagtgcaatagtatgattatggctcattgtagtctcttcctcctgggctcaagtgatcctcctgccccagcctcccaagtagctgggaccacgaatgcatgccaccatgcccagctaatttttaaaattttttgtagagacagggtctcactatgttgcctaggttggtcttgaactcctggcttccagtgattctcctgcctcggcctcccaaagtgctggcattacaggcgtgagccatggcgctcagcccccattacctttactcatcatatctccttaggctccttttggctgtgacagtttcttaaactttccttgtttttgatgacctcaatagttttaaggagtgttgctttcgtattttgtaagatgcctttctattgaaatttgtctgatatttttctcttaggtagactggagttataggtttttggaggaagactacagatataaagtgttattctaattacatcacatcaagggtgcacaccattatcatgacttgtcactgttaatgttgaccttgatcacctggccaaggtagtatcttccaagtttttgcacagtaatgttgccccccaactcccatcagccaccactcattcaatcctgtgttctttggaatgaactcactatttgcagttatgttgcctcccatccccccggcctttgagcatggtgtgtctacataaatgattttgaattcctctgtaagggagatttgtctctccttcatccatttatttgtttaattatctgttcatatgaatatggatttgtggaaattacatttttagtaaactaatgaaccacagtctacagcctgtgaaaactccctattattgttggaaccgaagtactgttaggaaataggtgctggggatggaaaaagtcatggagggcttggggaggccttacccattcacttaaatggaattgtgcctctgacacattaacaaaaccacatattctaaaaaattcacctcaaagtgccaagagtagagatacctccactgagaagtttgttgtcgaaaggagagaggagggagatacaacaagaaacgcatactagccgaagatattcttcttcaccttccaagactcacatgtgaactgaggagaaggatttgaagggagccaagtaatttctgtgtcttcctagcacttaggtgtgacttctagccactgggcgccagctgttctttccatgatctactcagagccagccccttgcaggcctgtccgctatggttttcgtagttgagcctacccttatggttttgttttcttcacttggcattgtatatgtgtatgtgtgtaactaaaacctattttaaaaatgagggaagcaagcccaggacatagaagagcaagccactgaaacctgccgaggccaaaaagacgtttgtgaaacattccaggaggtgctctgggcagcctctgattcactggcctccctcatcgtctgcagctcctggcttagggaagctgccaaaagcactttctctacgagctgtggctctctgtttcctggtgttgcaaaaggcaaaagttcaggattgaagcctttaccttttccatgtttgcttcttatatagcaaatcttgtgctggcttagaattgagtccgggcgactttcttgccttgagcatacacttagagctttgtagaaatgaccaagtgtatattgccccaggcagcactaaccagagggtcatgtcctacgtaaataaccccaccccccgccccattcccgtgttgactgtttgcttcaccaaggacacagtcattgaatcaaaagtgtgtttgtatctcagatgccttggcactggcggttttgtgtgtgtgtgtgtgtgtgtgattttttcctttatattgaataatgccaattaaatgtttctggtcacacatctgcagagcatggttttatcaatttccaaacacagaagagaaagccaattattaaaaaaaaaaaaaagaaaaagggaaaaggagatgaaaacaatgaaaaagaaaaagataaatgggaatctaaatttaaattctgactctcttggaaggaaaaacaaaaaagatgtccctgctttagctttgatgcattcctgcttctatggagaaatcttctgtttgggttattcctttctggggggactggcaacggtctagagctgacgaggtctttagcctttttgaggcagtttgtggcagtctgcccttaatccggcttggcctcagatactgcatttggaatactctgccttttcttttctttttttttaagctggagtttcgctcttgttgctcaggctggagtgcaatggcgtgatctcgggtgactgcaacctccacgtcccgggttcaagccattctccctcctcagcctcccgagtagctgggattataggcacctgccaacaagcccagataattttttgtatttttagtagagacggggttttactgtgttggccaggctggtctcgaactcctgacctcaggcaatccatctgcctcgacctcccaaagtgctgggattacagacgtaagccacctcgcctagctcttttttttttttttttaatggaactattgttctctccctaaaatgttctggaatattatcccaaggagtattttgttcatcacaaatttagatgttttgccttcccatgctctgctgaggactttgtttctctttttctctgccttaggcctcctctgccctcagtgtcaaaagcggtggttttaaggaacctcaaccacaagtgaagctcatgagctccagtgtcaatgatggttcagtatggtttgaaattaaacaactagagggagcatagtggcaaggtgaatggtgggttcctgggttgagacaagtcacctggcttctaggataccgaccggttttatgaccttgataaaattcactttctctgagttttggtttcctcatctccataaggagaggttgcaccaagcagactctcagctttgacagtcttgattatatcctaagctgtatttgttgtttttcagataatttggggcttctttctttcactctaccaacaaaatattgagtttgaagcttacatggccatgtttttgttttatgctttaaaatttttattttcacttatgttttacattaaatgataaattcatgtgggaaaacttaaaatagtacagaaaaggaaaaggaagatctcccatccctgatacccagtttcttctgccgaggtgctcgctgttgccggtctcaggtgtgcccttctgtggagatttgctgcacatgcataacatgccccaccttttctaaccacaactagtaacatgctcataatacagttctgtcctttgggtttttccccttctggacgatctctaagaaacattggaatcatcatacagaatttctctaaatgggtggaccatatctcccactgatggacattaagatcatttttaatcttttgcaattataaacaatactgttttgaatatccttgtacaaactgctctgttgatatgtgctttactttgaaaacaaagctatcatctaagttccacccttttccagactctacagttaataatgagagatgtttagtctgaaagatcaaatctaaattaaatggaagaaaccagtgtttccaccattacctcctgtgaatgtctcaagtaggggcaagtgttttaaagactcacatagatgtggcttgggaagagctcctctccaagtctgaaactcctccagattaggattcaggtattaataaaatctgctgagcaatatctggttgctatgtggctttcagtaatacagtacactgcttgagagtacgcccaatgcagcattttgtacaccgacaagggcagtctacctaagtgactgatgatagtcctactagaatttgttatgtcagtaagtcacctgagtcagttataaaattttccaaagtatctaagttataaaaattaacatagggctgggcgcggtggctcatgcctgtaatcccagcactttgggaggctgaggcaggtggatcactcgaggccaggagttggagaccagcctgccaacatggcaaaatcctgtctctactaaaaatacaaaaattagcggggcagggtggcacacgactgtaatcctagctactcgggaggctaagacaggagaatctcttgaaaccgggaggcagaggttgcagtgagccaagatggcaccactgcactccagcctgggtgatagagtgacactctgtctcaaaacaacaataacaacaacaacatagggttaacaacctgtgcctttgaagccttgttttcctaacctgggtatttctgatatcagaactattgggcatcttttttgtctctagtagttgtgtcagatactaccatattaaatataactactagtaagaacatacttttatagaaggttcagaaatgcctgttccttgaaataattatcattcttccatctgcgcctctcttccctggcttgaaataggtttcatgaattaaacccttctggatgtctggattttgtcttacttgaatctgtacttaagggaacttttcccctgcgacaccatctgtgcaaaaccctttacctcccaccccaggccttcaagtagaagttgtaattatactataacaagctctagaagtgaaatactcatctcaggttttttggcatcaatcatgactgtgctttttctcttgttcttaatctaagagtgtaagaaatgcccaactgattttattcattcatcagatcgtttcctgagctttccctgtgtacctgggattgtgccaggaggtgagagtccttggtggcaggcttaattctaagggggaaacctaaactgtctaggcaatatacactgatatcttcccttttactagcatgttattgggcccagagttgtaaatctatccaggctttcctcgagcccttcctcttagtaacgcaagcaacatttgggtccctattttgatgacctgctgtgtgtgtggtactttcttgcaaacaattgaaggcagattgtctttacagggttgctctgaggcttcagcagttgttcctcttcttcagtctaagatgtgacagaaggtggctagggacagttggacggggtacaagaggatctcgattttggtcttggctctacttgccactaaccagggcacatcccttaacctttctgggttacagtccctattccataaaataaggggatggactagataatctcccaggttccttatgtagcctaacagtttcatgttccataagccactcataaaaatccatctcatttcttcacacctctcttccaccagtccgttagttctcatgaaggcaggagctatttttccaagtttaagcccagtgcatgacacgcagcaggaattgcaataacaatttcagtgagcgtatggacaaaaaagaacatttttatcccaccctcacctccatcctggagaaatctttgccattgaattcttcctcaaagaaatctattcttctctagaaaagcttcagtgttggtattgtctttcaaatgtacatatatgtcgttcaaatatacacatatattatacatttaatacatatatttaatatatggagatttgggctacttaaattcatttaaggagatttacttgtaaatcatatttctacataatatgcatagcaaactgaagatgaaaagtatttaacttaagccaccaggcgtggtggcttccacctgcaatcccagcactttgggaggccaaggtaagaggattgcttgagcccaggaattcaagaccagcctaggcaacatagtgaaacctcgtctctatgtttaaaatatatacatatatatgaaatattataaaaaatatacatatattataaaatgttttaaagttaatgataccaaatatagcaaaaattgagaatttttttctcagaaatgaagtgagtatataaaattataccttgttttctttgaccctgacctaggaggaaatagactgaaaagcatggttttctttattacatgacattgcccagcagaagttaagcaaatttgactggtaaacaattttgagaaaaactagcacttttataaatgcatttttgcagaaataccaattataaaatttatttaaggattttaaaattatttttgtaaagtgaagttctttttttttttttttttttttttgagacagagtctttctttgtcaccaggctggagtgtagtggcgcgatctcggctcactgcaacctccgcctcccgggttcaagcgagtccctgacctttgcctcctgagtagctgggactacacgcatgcaccatcatgcccggctaattattttgtattttaatagagatggggtttcaccatgttggccaggatggtctcgatctcctgacctcatgatccgttcgccttggccttccaaagtgctgggattacaggcgtgagccactgctcctggccgtaaagtgaagttctatatgctgaaatttcactggttgttaaatgcagataaatagagcattttaaaaaaattgaaaatatttctcatgcgtttatccaggcacaacatgtttagcatttctgcataatttctttctcactaatttctccctttgaagaaacaaacatttttttctcagtcagatatttgttcctgagtttagctcatagctcaggcttccttgcagcatgcttttcaaacaaaggattaatggagtcctccttatatgtcggctcctgatctaggtgctttgtgttacatgttgtttgtcaattcactggtttgtgtaccaaagatcacatgccctccttacctctgccataaacacacaaattaactgagaaagtatacacatgcacacacacacacacacacaaatgatctggtgaaattatctcataacttgtgataacctttgtggaatttgctttagaccactatgttctatgtaaggcttaaaatgtactctagacagggaggtgtgaaatgagattttaacagaaacaaaagccgaggctagatgagtcaggattggggccagtattcgagcctccgtgaattgaattaaggtaataattacttaaacagtaatggttaacaggaaagtactttggaaggaatctcaggaatctatactccaaagcagaaaacattctgatggtctatttttgataaggtattgtgggccctggtcattaatctgtatgttcttccctcttgcagtgatgaatcaccaacaccagcagcagatggcccccagtaccctgagccagcagaaccaccccactcagaacccacccgcagggctcatgagtatgcccaatgcgctgaccactcagcagcagcagcagcagaaactgcggcttcagagaatccagatggagagagaaaggattcgaatgcgccaagaggagctcatgaggcaggtatggctttccatggtgtctggtggaggctccctggccttggtgccaaagctgatgggtaggtagctgcttaccttcagggtaattcttctagagaagaagagacaatagggctcaaagccctactccaagcctcttgattaaaatccagtttcttctctcagtgttctgcctgccttttcagaacgaagcttaagggtacaaggacgagctgtattagcatggctgcctttggcttccactgctagtctttagaaggagagaaaggagaaagtagagagacaagagtctgttgttgtgtaacaaattatcccaaaatgtagttgcttaaatagccatttcattatatcgcacaattttgtgggtcagaatttagaaggggctcacctgggatattcttctgctctacatggcattgactgaggtcatttagtggtattcaactggtaggtgggttggtctggatagttcacaatggctttacctaagtgggtggcatgatggtgaggattgctggaagactgggctaagctggaacaaaagcctgggatctatggtgtggcgatctcagagtagtggtactcattccatagcagctgggttttcaagaaaaagcattctaagagacaggaagtagaagttgccaatttcttggggcctagctctggaaacggtcgtggagtcgcttttgccacactctcttggtcaaagtagtcacagagaaccccccgagattcaagcagatagtggagtggatgttcctcagaagaaatgacaaaggatcttggtccaccacagagcatgaaaaagagggaagctgaagggagaatgagaagggaaagtggtttgtatatggactccaacagagtgctctgcaaaactgcctgggcatcaatcaggcacttttgtaccatactccattcattcagttttcattccgtcagtcaggagtgtgttgccgtgtgccctctgtgggtcaggctcagtgctgtacttcaaaaacgaatacaagagaattcctaaaagaacccacagtgctctccctgtttcagtggcttggtctatggaagagcagaattctttcttctgtgttgctaaactaatataacccatgttttcaggtctcatgctttttttctggctacatttttggggagaaaagcttcagtttattgttttaacttttcagactttgttttgtgactcacatgaagcaagatacatgaataacttccttttgctactttagagaaattagagaaataagtagttttaacattccagagaactttcttggaggaaaggaccgagcatgttagggtaaatgctgtttttttaaagctacatttgatactttcaaaaatacacattgacttccatgaatgaataatgtatttctcatcaaatacattccaggatataagaaatctatattgtgtgaggtttaaaatgcatggtaaattaaaatcatttctcagatatagtctttgaaaataaggaaaatgaatataaattgtgctttgttgctcagctgaactttcctccaaatttgaggaatacaacttaataattaggtaactacagttgtgtcttttaccctgaggatttatgtttgaactttcacggttatttcaggctaacggttgtttatactgattttagatatatagtgtcatgtttcttgatgggaagtaattgtattgttaattgttttctgtctttgaataataattttatttggaataatttttctgttttataatgtaaggtaaattaaacagtatcccaacagcattttatacattctcagttttatacttaaatgagctttagtgagttttttctttacacaaagttgtgaccattctgcaaagaatgacttgcttctctgtttttgcgggtgtgtttctctttctcttgcttctcctccttctttcccacagaaagtatttctgaaaaggggtgggaaaagtgccccaaattgtttcctttattccagctgtaggtgcctttgaaccaggatgtagtactgatggttcatattacagaaatgccaaccaagttccttaaatgctgatccttggaggctgtggaacgtggggcgttgtgctgcatcatagtgagcaattgcattgttgcattgtatatgaagcaggagaaaagattgtccagatttgctcacagggactcatgtagttcagccttgactctgtgtgtgtgtgtgtgtgtgtgtgtgtgtgtgtgtgtgtgtgtgtagttaggaggagatggaatggtggagtggttggttctggtgttctgatgcctttttatttttgttagggagtacaggaaaaggtctaaatagactttttaatcatggcagattttttccccatgcagaagcagcatgctcctgattgtcaaagatatgatttaagaccatataataaatggcattggagtgttctataatagttttctggggcatttgccaggacacctgattattcagtattcaggtgtgggctctgtgtttcatcttggtggattttttgaactcttttggtgattttctgcttcactttttgaacctaagccatggcagcagcagggaaatggactggaattaaaagtgatctttggctcacttgtttagttgccttccagcatctggtaggaatttggagagatgggggaagtggtggttctggtgaaatttaaagattatctgtacacttctgtttgttctctctgtcctacccctatgtcctgggtagtcaacaactgcctgaatatcccttgctcagtggacagtttgtaattacactggctctcctcttgcttgtaggcggccttaattgtacagcctgtcttcttggggcccaggccctgcaggtaggcctagacctacctgcccttctaccaactgagcctgtctgggagcaaggccccaggctatgctctctttctgtagtagaaagggaggttggcaaaatttaataagtagatgaatttatcccctaattactaataaattatcacgctgtctatagttttatcattcttgaatgatacgacgaatctgaaagatccctgtggagaatatgctatataaatattgtttcatttttcttcctgttccttctgctatgccgttgttccactaggcatatagtttgatgatgttgtgccatgaaaaaaacaactccttggtccttgttgcatgatttgatgtataccacaatgccaaagggtcacctattaactcattggcattgaaatcatgcgagaacattaacaaaatggatctgaggaaactttgattacaaatctaaagtgagccttcattatttcagtatggaagctcatattttttttccttccttcattcctttatctcttcattcattcaatcaatatttatttagtagaaaataacagacaggtaaatgggatgtgactgccttcagataacttgtatttttgcagaaaaggaaaaataattaactttaatccaagttaaagaccagaagagtaaattaaaaccattccctgcttcacaggggcccagtggctaccatctttgactttcattactggaactgagaccagatgcacctgagcagagttctgtgaaagtgagcatcagatactcctttttctttccagtgacccctcaggttactggctacagaattaggatcaaaagagccagtaaggtttggtatctctgctgataaggaatcttctgaagcaggagaatttccttaaatgcagtccctccaatctagcattggctggtgtagcaacagagctgagctacttgtatctgataattgatgaattatcttggaatgcggcagacacttcaagtggaggggtaccaggaatctaacatggaagacataaagagtgcatttctgtgaaaggaagtcttttgtctgtgatagagttttcttttatttttactgaatttcccaaaggctgtgaggctacttcaggttcaccaaagaaatggcaactctagaaaaaaaaagcaattcttattgaagttttgctttctcttcatttttttaaggaaattaaaatttgatttgttgagtttttttaagtagaaaaaaattttaatttttgactaagcgtggtggctgacgcgtgtaatcccagcacttcgggaagccaaggcgggcagatcacttgaggtcaggagttcgagaccagcctggccgacatggtgaaaccctgtctctagtaaaaatacaaaaattagccagacataatggcgggtgccggtagtctcagctactcaggaggctgaggcaggagaatctcttggacctgggaggtggaggttgcagtgagctgagatcgagccactgcactccagcctgggcaacagagtgagactctgtctcaaaaaaaaaaaattaaaaatataatttactgagttactttagtgattagcatttaaaaaagtgtttttgctaagtgcaagaaaccagacttccccccaaaactacatcctgtatgattccatttatgtgacgttctggaaaagcaaaactatggggacagagaagagatgagcacttgccagggttgacagtacagaaagagtagactccaaaggggcagcactgaggaattgtggggcagatggcacagttccgtgtcttggttgtggtggctatttcacagctctacatttgtcaaaactcagacatgtataccacaaagagtgaattttactgtatgtaaacaaaaagaataataaaagaaaacgaattgctacacacaaaaagacaaaacgtatgtttatggtacggaatgtataaaatactaaacaacaaagaaggaaattataatcacctatactcttacctagaaagagtggctgtaaatatgctgatgatttctttctagtctttttgtatgtatcatgtgtatcaatgtgtctactttgttttttaaaacacaaaagtggtagcatactttaatactgctttgttgcctcttcttaatatattgggaagtcatttttttattctgtgtcagccatgaagttgtgctgtgactttgtatgtacccattccaaagcgcctagaatcctttctacaacaggccgtacataaatttttaaatgtcatgagccacacacacccacaatgactacagagtattctgttgttacaactgaaaaattcaacgcaatatttgctcagtatcctaaaaggcacaattgcaactttaccaaatgaagtgggaaatcgtagtcacaggtcagacattgagaaacaggcttctcaatgcctgtttatctaaaagaacaattccttgacatgaaaacaggcatatggctttacctgaagagagtatttcttttcatgtgtgttattcatttaaatataacggtttggggccatctttctggaagattttaacctcgaggaccaggacctggaagacgagtaagtggcaaagccttggctcccccttgtcccttcacgggggctgccttgtagagaaatcattattcccaaagcaaattcagccctgcttttaccctcaaccttttctttctttttttttttttttttaatttgggggttgggggacaggagaatgcagtttgtcaaacaaaaatgctgactaagcctggcctcgggtcgccggggcaacagggacgagaaaagagggaggcctcggaattcttttggcaggtctgtgggatttctgccaggcttgacagccaccaggcgcggcgggccagctggctgacctcgcacagccatcctgacagagggctcctggagggggacacacctggctgtgagcagcactggcctggggaaggttctgaggcccccccctttttttttttgtcatgcaaagaatagctatttagcgagctaggagagtgtcgtattggagcagatcatgaagcataaatgtaggctatttcatagcctttgcttcagaacaggggactatttaacttttagaaaagcatttcatagcattaggtttcagagttgactgggttaacagaggtcacgtagtctaatattttgtgaatctataaatccctccatataagcttggctatttaagttcattcgttcatatatttgttttacaaatgctctaggcattaaaagtacagctgtgaacaacagaccccagccccttccctcacagagcttccattctagcttgtgtcaagcgttttatttgcttacatgtcccagaaataatccattttccaaaatgtcccagtgtgcccttgttgttgaacaatagtatcaattcaagtctttttttttctttttcttctctttttgagacacagtctcacttcatcacctaggctggagtgctgtggcacaatcttggctcactgcaaccttcacctcccaggttcaagtgattctcatgcctcagcctcctgagtagctgggattacaggtgcgcatcatcacgcctggctaattttttgtgttttagtagagacggggttttgccatgttggccaggctggtctcgaactcctggcctcaagtgatctgcccaccctggcctcccaaagtgctgggattacaggtgtgagccactgcaccaggcctcagcctttttttttttttttaagtgaagacagacgagtatctaaattataatgttttctttaatgtgatttgaaaggacaacagaaaccagttgtggaataatacaaatttgctttatgcactctgagtaaaaagagcaacaaatagaccatagataataatgacaaacttagtaaatggcttcctaaaagtatcgcagtttcgattgttcttttgtagggacagtctggcagctgagcattagtgatgagttgtttcaaaaaggcagtctccgggaagtgtgacagtgcattttagaatcccttggcaccgaattaaaaagaaatatacatcagtaatttttttttgttccccccgccgtcccccgtaaagaaggtaaataattcggcattctctctctgaagtccctcagggttttggcagagaaagcaatttctctgcatccagaataactattttaatgttaggatttcaaaatactgtctttttttttttcattttctttctactcaccccaccctttataattaaaacaatccaatcttccatgtttgtagagtccctggccacacacacttaaatcaagcagagcagcctctgaagagctgattgtcatttgtttcccttttgaagtgcattctggtgagggcaggagctggctggcagagtgttccctcagccaaggcgggacagagctgcagatgctttcagctgccgtttactttctcacctcctctgttggtttattccacaggcaagctgcaggccaaggacctagaaggagaggaggtttgaggtttgcttcctgggacaccttcagctcacaaataatcatttgtctttcacatccttacttcttcagctattttacacatcacccgtcctccagctgctaggaaagggtattttttagcccataaataattactcacttcagagagctagatagttgaccacaaactcaccaagagattcttgagcccttattttgcaagtctttccaccccaagcttggacatagacaaaaataaatttgttggaggagggttgggtcagggtcagcagggagagctttccttctgaaaagtgcccttgaaattggaacttgtaactttgcttgatgggttgtgaattcctaggacatgagctccactcatatacgttgaaaactatcattgaatacatccagttcattctgttgccctgttcagggaggaaaactatgttcaggaaagttaaatcggctgtttcattaaatttcctctgaactgtctgaggtagaggggttggtctttctattttattgctgggaaaacaggctcggaaaagtgaagtaacttgcccagttctcacagccagcaggtgaaagggttgacaatttgaggtctgtcaacctcaaccctcaacttttctttctctgccacactgagactttgccacactcttaactctgagcctcagtttcctcatctgtaaaatggagacaattgggttgtcacgaggaagagatgaaataacacgtttttcttttcttttcttttctttttctttctttttttttagacagagtctcattctgttacccacactggagtgcagtggcactatcttggctcactgcaacctccgcctcctgggttcaagcaattctcctgcctcagcctcccaagtagctgggactacaggcacatgccaccatgcccggctaatttttttgtatctttagtagaaacaaggtttcaccatgttagccaggatgggaaataacatgttaaagggcttagaacagtgtttcacacacagtaagcaatatgcaatttttagctagtatctctgcctcccacaccatttaacactatcagcagcttgttctgttaactgcgtcaatgtgccaggtccattataagtacgctttctaatctttatagcatcccagcaagatcagtcttataaaccaccttttttttttcaggtgaacaaactgtcaagaaaggttaagaatttagttcaagatgccacaacatgtagtaactgaactgggatttgaactccaatctttctggttccaaagacagttttgctcttgtgccatgctgccttttcggtgccaagctctggaccccaacttaaaccccaactactgtttcagaaatccggtggctaatagcctggagaattgagaagaaggcagttcctgccctgaactgataagtaactagaaagcccttcatcgtatctgcctcaaatctaggctagaagagatcttccttctttcctgtgacagttcattaataatttgagagccactgtgtgcccttctagtcttcccctgtggttaaatagccccactcttcttcataggatgtgatgccctgacccctctctatcctgattggtctctggtcactctttgaaaagatttcagtaagataaagtgttgggtagggacctggatgcagccttgcacttgaaggttgattggaggaagaggtcagttggactagctagagaagcaatgatgacctgcttcttgagacagaaagcaggttttgagcttggtctaggaaactgaaggtttgtttggagggcagggtggacacagaggggaccctggaagggatctgtgaatatacatgtttaactggagcacagtgggaaatgagtgacaagccagcttagcgtttgttttcctgcctcgactagagggagcagaggaaggaaggggtgctgagtgaaggcagctgcaccaccgatgctcagcggcagaggccttgagttatgccctcagccagccttgaccaactgtcacccctctgtttccatggaagcttacttcatccagtgcctgtctttgtctttgcttcagctgctttagtttcatccattttgactgctgctgtttggtctaagtcagacgtttgcctttcatttttacccacgcaagggtagtggatgtcatgtggcagtccaaatcctactgggtctgggctttaattttatacctaaatttagtttaaaacaaaaccctcccctgtttggatggcaacatgttggtgaggttagcccttttattttcagacctcgggttttgtacagtttctttttctctttcagttcatgagttggaatagggaagtattttcattcaaaaaaaggctagaatttttaaagttctaaatatagaactcgtattataaaatttaagtgaagtaaaacatctcactactttccatttatattcgaacaaattttatgttatataaaaatggtttataaacctctccttgtttaaaaaaaattgttttcttagccttggtgaccattatgatgaatttcacactttggtttaatccctccaaggtgaaagttgaccaggaagaaacctctcaccacttaaagtggatcagttccacatgacagtgtgacttttaaaattgtttattttgttttttttgagattggaattcagaaaatgaaataataataattccttcagtatttattatgtgatcttgagtgcctggcactgttctaagcaccttgtagtgttatcccgttttatcatcacagcagccttcttgggtgggtgctcttattatccccactttacaaatgaagaacagagggttaaataactttctgttagatagcaggaccaggtttccaattcaagcatctagctcctggccactcggccctcctgttcatcctatgtgaggagcaggaaagagtgcagcaggaccatttcttgaggatggagcctgcacctggctagttgggttgtatacaataggctattatttctctcatatttgtggctgaggtgagattgcatgttcttagtttatatttccaagtacccactgtatgcctagcactgttaaggtagttgggtacaggagtgaacatgacaaacaaggccccttccctcgtggagcttacattctagtaggaaagacagagaatgaaaacttaagttgcactgaagaaaattaatgcagattaagagacagaaaatgacaggggtgaggccattttagacaggggtgaggtaggagcatctctgaagagatggcgtctgtaggaggcaggcgttaagtgagggaataagctttaggaagactcgaggaacaccttgcaagcagatagaacagttggcgcaggtgcaggaggtgggaggagcagcagagaaaccaggagactggaagggggtgaaggaggggagcacatcagagacatgggaggaaagggtggccagggctgttatgcagggtgtggtggtctgcagtgaggacctgcctctatttaccatccaggtggaacaagaagcaggtcgctttagagcagggggtcacgtgagcttcactttggctgctatgtggaataacttgtgacctaagaatgattttggaataatcttagacaaagtgtcctattataaataataactttctaactcagactggcctaatttatatttcaaagctattattcaggccgggtgcagtggctcacgcctgtaatcccagcactttgggaggccaaggtgggcagatcatttgaggccaggagttcgagaccagcatgggcaacatggcgcaaccatatctccactaaaaatacaaaaattagctgggcgtggtggcacatgcctgtagtcccagctactcgggaggctgaggcacaagacttgcttgaacccggtaggtgaaggttgcagtgagctgagatcacgccactgcactccagcctggctgagagagtgagactccatctcaaaaaaaaaaaaaagcaatcattccgggtacattcaacaccctttctgatttttctcttatttgttagtcagttgaaggtagaaaatgatactgtgagccccctacagacagaaggcggcatttgcccttaggatgacttggtgattaagtcttcagggtagttagggaaacatcagtgctggagactagagcttctgttctctttgatttagaacagatggaacaaatgtgaaatggcacagtgaaacatttcctccaatatagtataggtttttcagctttggttatcataaataatcctttaaattttatttatatattttatttatatatttagacacacacaagcattattttatgttttatttactggaaatagctaggagtaatttaaattaataggaaagtttagaactatttattttatatctaatttttgatatttgttcttataattttatatattattacagataacaattcatgtgtgttatatatagtgtatttttttatcccatgaagttccagaaatgattcttaccatatataaatttagaactcctggaaattgcagattcaacttgtattttttttttctttttttgagacagagtctcgctttgtcgcccaggctggagtatggtggtgcaatctcggctcaatgcaacctccgcctccccaaattcaagtgattttcctgcctcagcctcctgagtatctgggaccacaggtgcatgccaccacacccggctaatattttgtatttttagtagagacagggtttcaccttgttagccagggtggtcttgatctcctgacctcgtgatccacccgcctcagcctcccaaagtgctgggattacaggtgtgagccaccgcccggcctcaacttgtattcttaagacatatgttgataaagttttttcaatacaaaggaatgcagccatctcatcaacttttaaattaaaagtgtatttgtttagaggtaaactcccacatttattcagaatggttgaaaaatggaatattctagtaaagttcatgtttttggataatgagggttatgagtcaaaagattcttgcatttatggttaataaagtattagaaatttaccattgatgagatacattttttcaaactgtggctcagggtgtatgagtgtgcttgagggatggggactggtgggactcaggctttttatgccagattcaatccctgttgttccttctgaggctttcaggaaaactttggttggataataaggtttctaatgcaccctgcctgccatgttaaaaacaactatcagaaaataatttgatttttctaggtttattcagaaggcacttccaagatttagatgatgaaaatcactttttaccaaaaaaatctccagtttttggtttgctttttgtagattcctgaataaaatttgttagttaagtatttgattatttgcaatctagatgaacagaagtgagccaaagaccctttccagctagatttatttcagtataagttaacaatacagtttttttttaaatcaatcaggtctctcatggtttgtaacagtgcaaccaactctagtaactgaaaatttttatagccgatgacttcactaggacttgtctagacagcagctaccctctaaagtcacatcatgttagggctggaagagatctaacgaagatactgtaatttagaagtcctaaatgttctgtttgccattgtagccatggttttagggtttgagggacagtgagaccaatgacttcagcatggaaagtgggaaactgataggcataaatatggggaaaggcctaaccttggtttgggatgcaaatgtaaacatacaaaagtattctctggaaacatcagcaaatttgaaaggaatttgatgtctggttatgtttgtcaagatggagagactcctggagattatacctagagaaagtagttgcagtcagtaaatttgtagccttttggatagactcttcttagcaatgtaatgctagcttttataaaataatgcttgtattatttgtttctgctaatgaaatccatatgctgtgaaacagttacttgtctgtgggatttggattggatctacatggttccccaaccttcagcattttagtcaacaaagtagtcaaatagattgacttttttgtttttttgttttttttgagacagcgtctcactctgtcacccaggctggagtacagtgtcgtgatctctgctcactttagtctcaacctcccaggcacagggctcctcctgcctcagcctcccaagtagcaccacacccaactaatttttgtattttttgtagagacagggtttcaccatgttgcaggctggtctcgaacttgtgggctccagtgatccgcccacctcgacctcccaaagtgctgggattatggacgtgagccaccacccctggccactgattgactttttaaagtaaactttcaactcattgttttgctttcctgtctgtaaacataaaactgccagatgcaatttaatgtagagcctggactctgtaattccacagttttactggcctgtaagtggcaaagaccagaatgtactttatagtccagaggagtctgattgctttgattgatgtagatttggtttgagaacctgagatagaaaaagccttgtctctgacaaagtgttttgagagggctttctatgatttgggtgtttaaataattgcatgggtgggatgattgcaacattaagtgcccttagatcaaataatagctgagcttcccattaactttgtgaatgtgaagtgacttatgtctgtaagactttcttcggagaaagaatactaatggttgcctggtgattttgacttgctgggagtaaatacacagtgctttgtatttggtgaaaagttttgatgtgaagtacactttgctccatgccttgtgacaatgagtgcatgactcttgcttcccattctgactgtaggaagctgccctctgtcgacagctccccatggaagctgagactcttgccccagttcaggctgctgtcaacccacccacgatgaccccagacatgagatccatcactaataatagctcagatcctttcctcaatgggtaagttaatatttgggggccacttatttttattctctttattatgtgatctagactataataggatctttgtttacattgggaagaggtggggagcttgagggttgagggtgagaataaagggaggaagtgggaggagctggcagaaaaaagaaaagcaggggaaatcatctgcctgttaaaaaatttccaaattaaaaaattggtgataggacgtagagtaaacccctagtcaagaatttgaaaatgggcatgaacttatatttttaaacatgatggtgtcgtctagtacttatacttggaagaatcttctggttttatgtaaccaacaggggataaaagcatgccatatggcaaattgagaacagaacaattaagagattatgttcggccaggcatggtggctcatgcctataatcccagcactttgggaggccgaggtgggcagatcacctgaggttgggagttcgagaccagcctgaccaacatggagaaaccctgtctcttctaaaaatacaaaattagcagggcatggtggtgcatgcctgtaatcccagctactcgggaggctgagaattgcttgaacctgggaggcggaggttgcagtgagccgagattgcaccattgcactccagccttggcaacaagagtgaaactccatctcaaaaaaaaaaaaaagaaagaaaagaaaagagatgatgttcagggtgaaatgtgaataagatctatagtttagtaaataatattctacagtgtcagatttctgattttggtaattgcactatggttatgtaagatgttatcactggggaagctggtgaagggtacatgggaacgctctgtactcttgttgcgtcttctatgtgagtttaaaataatttcacaatttaaaaagtaattaaaacaaaggagcaaaagggaaagagaatttagccagaaatatcttcatgagcagaagtagtttttaaatcaaataaaaagggcaattctgtatttcctgtgccttttattctgcccttgcagagacgtctggcaaacaaacaatacaattatgaacattattaaagatagagataaaaacaaatagtagctgaaataataattaatggaggttttaaattgttgattttaaagtatttgaaacacagagaagtacaaagaataacatgaattacccatgtacccactacccagatttgccatagttttatttaatcttactttttaacaaataaaatattacaattaatatttgaagccatccccccaccactgaaatctcgtttcttttcccttctgtccccagtggtagccactattcagaaactggcgtgtgtccatcacacagacttttataccccttactgcccgttagtgtatgtatccataagcaatattcaacatagtttttgttttttttttttaaagttttacataaatggtgtcatactctgtatgttgaagaatgttcaaatggttattttgaggtgaaaaggaaatcaatgtcaatttactgtgaatggccacacatgattattttcattttcatgagggtatgtatttcaaaattaaaactttccttcctccctaacctggaaagttgggcagcatggcacaactgcactagtttagagcttttgtgactgtgttttaattttgagatttatttagtgggctcatattgaagtttcttcatcttttgctttgcagagggccatatcattcgagggagcagagcactgacagtggcctggggttagggtgctacagtgtccccacaactccggaggacttcctcagcaatgtggatgagatggatacaggtaggagcaaagcctgcaagcacttacaatgggtttgtgttttttaaatgatctcttcggttatctcaattttatttttcttttattttatttttataatttcaacttttattttatatttgggggtacatgtgcaggtttgctacatggttatgtgatgccggggtttgggatacgattgctctcgtcacccaggtagtgagcatagtacccaatagtttgtttttcaccccttgttcctccccactcccagtagtcccgagtgtctgtaaaaatgttgaaaaaaaaaaaaatggaatgcttcatgaatttacatgtcattctcatgcaggggccatgctaatcattccagttttagtataggtgctgccagagcgagtacggtcatctcaattttaaaatccaaccagaaacactcaatctcaacgacaacataaaataacagctgaaaagccactgaacccccaggcactattaataaactgtagccccttcctcatagattatacaagtatagttttacatctgggcgcaggattttaaattctgttgttttttttttttaattcatctttgctccatatagtcccttcctcacaattgcatcaagacaccactgtttgtttgccatgtttccacattggggtatttatgctgttctagtttttagttgtaatatatgggccaccctttctcctggaaagtgacactggtttatagttctagtatccaatttttttcatgtcattcactgcatttgaaaagcaattggcagtgggtatttggaatgctgagcaactcagaggattcaaaattgtcacttccaagttccaacatggtaacgacatcctccctcaggaattaaagagaagagagtcagggttactcttaccttgtccccagcctgtgcatccttcaggtccagcctcaccaggcttcccgattacctttctttttctccttttctcaaggagtgagacttccaattgcagaaactgaagttagtcttattagccttacctagacttaattatgaaagtcataaactctaagaagatattctagaaccaaaaataaatgacagccagggtgtccactatttggagttattcatgaaagttccttctccattatcattgacgaaagtaattgttttgtgttgaaaataaaaaattccttcccccaaagtgtttgccatagtgcctgtagttttttacactctactctttgatggcttctctttgtgttgtgagtctaaattgttggaaagatcaagagtcaaactcatagccaggtgtcttacaaatgcagtacattaaagctgctcccctggcgtctttcgtgtaggttgtcatctttgcattgagaagattgcaaagactatcttgtgaggagtgacacaggaatagtttgcactgattgttttactgttcttcagtttattacttcagttcttcccccaccaccaccccctgccacctttatctctctctctgctttttgagtgtgagatttattttgctatctttggaatagccttaggaagtggctccttcctatgtttaataattctttactttcatcttctaaacactgggaagccagtaaggataaaaagcaaagttaaggaaaaaagctcaggagatctaaatctaagtttgacattcaaaaaaaaaaaaaaaaaaccataaaagaggatggattctactctatgtctctttaaaataacctcaagtgggtaagtagggagtgttttattttgaagccgtaatgtggaattaaatgacgtcctgaaaagaacatagttttagccaacaggcagcctgatttgaatccttgcttctccattcctagtagcgcctttgggtaagttgcataacctccgtgagcctcagatttctcacccataaagtgggagtgatatgctcacggcagagttgtgaggagtcatgagatcacagagaccagctcaaagtgctcttctccagtaagaagactgatgtcatacatacaatggacttgataatgtcagagtgccacgttaacctggttaagtgagaatcagctcattgagtgtgggaatgtgagtgccaagttaacctggttaagttagagtcagctcattgagtgtggggccacctctgtgaagtctttgtaggaactggacatacatcttctcaaggggagaaatgttaattatacagtagcaaaatgagggaagctgtgggggcaggcagagctcaagtgtggctagaaaagatctatcaggcctgtggaccacgcgctggccacatgctgaagggaaacgagccagctgagcactccatttgcaaaacatacatggcagcaacagctgggcttggtgcgaagatccagtaaagggaataacatgagcaaaggctgggaaatcatccatccttccagaatattctgcagtaatcacacccttttaagaattgccttgtggctgggcacggtggttcacacctgtaatcccagcactttggtaggccgaggtgggtggatcacctgaggttgggagttcaagaccagcctgaccaacatggagaaatcttgtgtctactaagaatacaaaattagctgggcgtggtggcacatgcctgtgatcccagccactcgggaagctgaggcaggagaatcacttgaacccaggaggcggaggttgcagtgagccgagattgtgccattgcactctagcttgggcagcaagagcgaaactccatctcaaaaaaaaaaaaaagaattgccttgtgtttgtctcttccactttttaagtggataaactgcaaagaccaaaaagattactatgagattgcagagctgcttctattttaagattgttaactttaatgaagaagcttagccagtatcctcatgccttccatcctgagaagaaaggataagagtaatttttttttttttttttaatacggggtctcattctgtcacccaggctggagtgcagtggtgtgatctcagctcattgcaacctctacctcctggattcaaacgagtctcgggcctcagcctcctgagtagctgggattacaggggtgcgccaccatgcctggcactgtttttttggggtttttttgtttgtttgtttgttgtatttttagtagagacagggtttcaccatgttggcaaggctgttcttgaactcctgacctcaggtgatccacccacctcggcctcccaaagtgctgggattacaggcatgagccaccacacccggcctaggaattctttaaaacagagattttgcttggctaaaaattatattcttgagtatctgaaagttaaaatgggaaattagtaaaaatgaatgattctaactggagatgaagagaaaaaaaggcatccagcacattagatcagattgttttttagacactttttaaagcctcatttttatctgttacactctagtaagtagaagaaagttattttggattttgttttttcgtttaacgttatttttcaatatcagtaacactatattgaggtcatattgttgaatttgatttaatttttcagtttactaccctttgcaatgaaaatactgtaaaatgttacccaggagtcatttatattttgtgacttctagaaaagccattgtgttttgctatcaccaaaatccaaattggatgatggttccttcatcatttggaaggatataatttttctccctggaaaacacagattgctaaagtgaactttcggcaattttgcttaaaatagtgaaacttccctacacacgtttcaggaaggctactgcacttgtaacacacaaaagataatttaacaagtttttaaaaaatgacgttatggtggaagctggccttagttatcaatgcttctcaatttttgaagtagatattatctcttcagaaaattgtttgggactttttgaattaacctgttgttttgatattgtgtaattaatagtggctgaagacctgggtttttctttctctcaggacaatgaacatttattatatttttgtatgtatataactttgtatatatcaatgacacccagagccatggatatgtggcagacactatatggcactttactctaacttttgtaaaaggagcatatgatcccaatttctagatgggtaaactgagaatcaggcaggttaagtgtgtctaagcttacacagccacaaagctcgatctaatgacaccaaagtcagtagtgcattctgtcccatactatgacacataaagaacctatattcttcatgtcatatcccagacacctacttttcctctagtacagcattttctcacctgtgttctgtagaacttcagttttatttgaatacacatactgccaaaataggtttaggtgattaaatgggtttaggaaatagtgtcttaaagaaaacaaaagatttctttactctaagacttaaagccttaacatgctcatatgcactgtgctcatatgcttgtgagaaaggcagatagttgtagggtgtaggtattacagaaagagggaaaacgtctgcagaactgcctttataaatgatgcctaaagtcatcaatgaagacaactttttaatagcctggttaaaagaagcttcacaccattctctttgaacataaagaaggatggtatgggtaaacctaagcttacaatgaaacctgtagattatagttctgtaataagctgtttattacagacaaggcctctctactcttttgtaaaacagttcttcacacctttgtcatgggaaggcacagatcatagatcagatccacagtgcctttcacatgctcctttcttatctccttggccttttccattctggaccacacctatccagaaataattttcgatttcttccacatctctgtacctcttatgagtaagggtcaataatgtggtagttgaagacatgaaggtgagggttatgtaaatacttgaactgttcctccttcaagagcctaaaagaaggaattaaaatggtttcttttcattttgttataggagaaaacgcaggacaaacacccatgaacatcaatccccaacagacccgtttccctgatttccttgactgtcttccaggaacaaacgttgacttaggaactttggaatctgaagacctgatccccctcttcaatgatgtagagtctgctctgaacaaaagtgagccctttctaacctggctgtaatcactaccattgtaacttggatgtagccatgaccttacatttcctgggcctcttggaaaaagtgatggagcagagcaagtctgcaggtgcaccacttcccgcctccatgactcgtgctccctcctttttatgttgccagtttaatcattgcctggttttgattgagagtaacttaagttaaacataaataaatattctattttcattttctgcaagcctgcgttcttgtgacagattatacagaattgtgtctgcaggattgattatgcagaatacttttctctttcttctctgctgccccatggctaagctttatgggtgttaattgaaatttatacaccaattgattttaaaccataaaaagctgaccacaggcagttacttctgagggcatcttggtccaggaaatgtgcacaaaattcgacctgatttacagtttcaaaaactgtattgatgacagtagtaccaaatgctttaaaaactatttaacttgagctttaaaaatcattgtatggatagtaaaattctactgtatggaatacaatgtaattttgaatccatgctggctctgatggctcttattagtctgtatttataaaggcacacagtcctattgtagcttatctttcgttattttactgcagagcatctagacaacttagtccctccagcgggaaagtagcagcagcagcattagtcacaggtcttacactacagatcttgtgaaagagaccagtttggtactaattatgagcattttattcaaacaaaagtttttgaaatattacaactggggatttaaaaaattgcagcttagaatctgatggtttttttttttcttgatgttgtttgtttgtttttgagatcgagttttgctcttgttgtccaggctggaatgcaatggcacaatctcggctcactgcaacctctgccttctgggttcaagcgattctcctgccttagcctcccgagtagctgggattacaggcacctgccaccacgtccggctaattttttgtattttgagtagagacggggtttcaccataatggtcaggctgttctcaaactcctgatctcaggtgatccacccatctcggcctcccaaagtgctgggattactggcgtgagccaccgcacccggccttgatgtttattttataaagcactgtaattttgtagctgatgacaaaaggcagccaaatgtttttgataaatcagtggcaactgtatttttgtcttttgaaataactctgaaaacatcaggacaacatagatttcaacctgatagcacaccacacacagtgagctgttgctttttaaattctgaagccttgtcaggtttgcttcctagatttcaagtgtttaaaataattctatctatgaaactgaaggatgaagcagatctctgactgacatgtaaaaaaaaatgccctttgagggtgtatggtggagataaatgtttctgaattcagtaaaattgattcctaagtatattatcctaatcctgtttgctacagttggtataaaaaggcatgaaatatgtattcaatacctcttatgtaaccaaaaccatttttaattagcttttaaggactgagagagcatcatgttcaactggcatgcagtctgcctgcattgccaatgaagtcctcaactgtttaatattttgaactaatattatttataatctatgaatttaatcttttttgaaagactttaataatttgagtctctgagaggatactttcaatttccatgggggacttatttgttggggatcttaaataagattccttttgatctaccggaatatacatgtacagagtacattggatcatgttggaaagaaggcaagtgaaaaggtcagagatgaagtagcaaagttatggaatatcgtggaaaggatactagttgtgaaatggaaagagacaagttatagtaccccaaaagcaaaacaagcaggagatgcaagagatgccccaaaaggacaaagcaacaattttctgttgccacctttataccggaagactctgttgtagaagaaaagaaggctttggtgcaccttatgtgggaggaggaggggcagggcatgctgatgctgagcgtacaggcagacaagagcgtagcctgctgttgcctccatcactatgaaatgacttattttacctgaaggacccatggtttatgttcctctaattcctttcactctccctaagccctctgagagagatgaagatagatgattttattgctactaaattgaagggagcactatttctttttgtcttttgttagcaaaaaattgcaaaaagaattgtacattcttgctaaaaataaataaataaataaaaaattaaaaaaacaagggacctaacaaaactcagcagtgttactgtatttttaaaaaatatttttatagactcattttcaggttattaaatgtaagagaaacagatacccctcttttttaaagtaggtaaatcattgatgatttatattaccaatttttagaagtaattttctagtaagcttgtggcatcagaaaatactagaagatttttttagttaaattagttagaacatttatgaatgaatataataaatattttttcagaataaaatatggaccctttgtgtttactaatagataaagccagatataattttttgtttttaaggccacaaaatatggcctttgttaaagaacactaaagttagaaatctaaagttagagcaactttttaatggctatttcctattattgtaagtgttaaaacccctgcagaattcttgataaggtgctatttatactatatttcttattataagataactgtctttagtcttcttagtactagtctttttagtactaaatcaatcagtaaacatcatcatttcaccccaaaattttgtcacagaaaaggcgtatcaaatgaaaaataatttcagagatctttctttcaagatattttttcctgataaaatacattgtcttgaagtaaatacattgtcaaaacctaattgcaattctgttaaatctaagtaatttttagacagtgtttcaccgtattatttaggatgtgaaatgccatttctttcactgattacaccatatacaggaaacaggtaaaacagtgaaaactttattgtgctggttgatgccaacttggttgaaaagctctctgcagaagaagtgatctagactgacagaagtgttgctaattacaagttgtgttctcatgacgtaattagaaagtaacttctcaaagtacaacttttatgaaaaaaataagctgttaaaaaaaggaaatcgtaggttaatttaattgggaaaatgggcaattgacagagaccattttcctaacacatatatgtgctagtactttaactttttaaaattttacttctacgttttgtaatataaaaatttctattttaagtttagaatgttatacgtaccgaaagtatgcagccaaatcgatcagatcaaaccattttacctggagtttggtactggtttttacttctctgaatctgtataagaaaaataaagacaattgaacttcca

SEQ ID NO: 118 - DNA, 35887 bp, Homo sapiens
gttactgaagccctctgcgagcttggatgctggacgagggagagggtgaggccaccaggcaatgagcgccctcggcggccgcgtgatcccgggggtggggcccatttctgagttggggccagctccccacccccaagaggccccacattccgggccagcagcccagaaagtccctccccgcaggcggagacagccccaagaagtcgacgccccggtcccgccgcccggccactacccagagggctgccgccgcctctccaagttcttgtggcccccgcggtgcggagtatggggcgctgatggccatggagggctactggcgcttcctggcgctgctggggtcggcactgctcgtcggcttcctgtcggtgatcttcgccctcgtctgggtcctccactaccgagaggggcttggctgggatgggagcgcactagagtttaactggcacccagtgctcatggtcaccggcttcgtcttcatccagggcatcggtactggcacctcctgggggggtgcggggaggaaagcggggagaacggcgggggcagagggtcctccgtgaagccccttccagctgaggaagtgctggaggatcgcggggcccggaggagtgcggtgaggagcgcgcgggaagccaagtcggctgggcgggagggaggctggctggctctggggcgggacagagctgcggttcaggaggatcgccgcgagcgcggggccgggggtgcgcggtggagacgcgctgctgggggcggcggagcggggccggccccacttggttaactctttgcggcgactggctaggacgcactggaggggcctccaagacccagaaacttgagcccgggcgcgatgccggagcgccgcgcagtcgggccgctgcagcccacgcgccccggaaagtcgcccctgtggaccgagcctgcgcgatcgggggcgcggaaacactttcgcctcagccttttgctgaacttgcttccaggctgcagatgaggaggggaaggcagcggggaaaagattgccggagcgagaatttgcccgtatttgtaacatcctcggccctgggtaaaggggctggccaaggggggcgagtgaagcatccgccctgggttcctctcctcctagagtgttaaactcagtcgagtccgggaagctgccaggacttccaagtgtgtttcgccgccctgcccagtcattggacggtcttgagcccgacttgtttatgtggcagaagagtggcgaaagttcccccgcggggcttcctattgggcactggcccagcactccgggtgggagatgcccggagagggcccgcggctgcctggcaccgagggatgcctctgctcgggatgcccccggcgcaagctgcgtccgtgtttggcccgcggcgagccagccccgggcctgcattctctgggctgaggctggcgcgggggaggggctcagcagtcgctggcaatgtttgttgtcattgtgtagtgcctctcaatgtcctgactgcttccttcggtttgccgtgtagctggaggaacctctagcttttggcgcaaacaccatttatttgtaaccacttccccaaaggcacggccttcagaaagtagttagagaaaggcagcaaggggtggagtggtgttatgtcgcagaaaataatcgagaggagtagcaagggtttggaaagatatgcccactggccgaaatctctagctttgcctgcgggcaggctgccttttcttcaccaaatatttaactccccacaaacgagtgtgcaaaagagtgctgacctcattcctaaagaaaagtgattttggcttttgtttttgttggttgttttaaacttgtactgcagctttggcaagtgtggccagcattctcccactctggaatgtagtggaaggtgttactaaccctcagcattcaaaggcttccctggtgtgagatcggcatcagggtgtgagatcggcatcagggtgtgagcaccactgggcacctaaggcatttcgttgcgtaactctcagttattttgccactatgcttataagaaaaaaacatactcaagttccaaagtaactgtcagaagcactctttccttcgtggtggagcccttaagtttggccccgagctgtctacaccttgtttgctcaaagagtagagccagtctcctcttctacccaactcttcagagcagcttctaataccaaaaagctttctggaggtcttggaatatcttctcataattgagggtaagggaaacacaagtgttattgctcgttgcctgacttgccacagaggagaagacatcagaatggctaatagtgattgcatgctgtgtgtccactaagtgcattatgtcacatcacatgtatgtaagagtaaactgaggcagagaagttatgtaacttacccatgaaagttgttttaagtcttttcagtgaccttatcgtcaaagttggattctctgcttttatggcaatatgcttattttctgccaaatctttttagacagcgaaaaccttcatctaaaatatgttttgaaactcttcattcatgttagagtccaatatacggttttctaaaaggtttttaaatttctctaaactttgtacttctcttaatctgttcatacttaactcttggacaaaaatgtgtaaattttggcaattttcatctgctgctcttacgaaaatcttgtttctttttttctttctttcaagacgtagtcttgctctgtcgcccaggctggagtgcagtggcgcaatcttggctcactgcaacctccacctcccaggttcaagcaattctcctgccccagcctccccagtagctgggattacagatgcctaccaccacgcccagctaatttttgtatttttagtagagacggggtttcaccatgttggccaggctggcctcgaattcctgacctcaagtgatccgcctacctcggccccccagactgctgagattacagacgtgagccacagtacccggccgatcttgttttctttaggttcaattactgtatttgtatcaatggtccagagtttgtcccgtcattactcatcctgtttcctgtttggatcctggatgtgcaaatcactttaatcataatgcatttaattgacatgagcataaatgttttcatacatgtaggcacatgtatagttctccccagttcttccatatcttggccaacccatccacattcctcaccctaagtattaggaaggctccagtggaaggagggggagtaataaataaactttataggctgcgagggacccacatgttacagactcgccatgttataacagacttttttaccgtgtgtgattgctgcaaggaggaaaattttaggctatgagatttcaaatctctaacaaagaacacgatgtattggagttcttctcttctgtaatacacaaatatttggagatgaagaagagaaggctaaagtacagttattactctaagtataaaatgctttagaaatgcaatatacaaatagtaaacaatatttgaaactaagaacaagtatgagtcctttgaaacacctttaagaagtaggctctgggccggcacagtccagctacttgggaggctgaggcaggagaattgcttgaactcgggaaacggaggttgcggtgagtcgagatcttgccattgcacttcagcctgggcaacaagagcgaaactcccgtctaaaaaaaaaaaaaaaaaaaaaaaaagaagtaggctctggccgggcacggtggcttacgcctataatcccagcactttgggaggctgaggcgagtggatcccctgaggtcaggagttcgagaccagcctggccaacatggtgaaacactgtctctactaaaaatacgaaaattagctgggcgtggtggcaggcacctgtaatcccaggtactcaggagtctgagacaggagaattgcttgaacctgggaggtggaggttgcagtgagccaagattgtgccactgcactgtagcctgggcaacagagtgagattctgtctcgaaaaaaaaagagggataaactccaaagaagcaaagctaacatagaagttacaaaacaaatctccctctccttctttattcccctttccctttctcgctcaccctctctctccttgtcccattttctcctctgtgtccctctcccttcctttccccctctctctcccctcctttccccctctctctccccacctcccatactccaagtatattttggaatatgtatatattctaaattaaagtataacagatcatgggaaatctaaaactaaaataaaattttaaactagtgggaaatctagctaacagactctaacatgaatgaggaagggtttagaagaggctttgtgcttctctgaaagaaatgtttcccatgaaataagtatactactaggaaatcagagaaacgaaccttgaaaagagggccacagaaaagactgaaacaaataaacgctgtcaaagtggctgttgaccttttaaaaggttcagcaaggtggaatgtgttctttagtgaaaggtagaaaattcgggtgtctacatttagcgaaaagaagtcttggcaattctatattccttcctttcctgtgtagaactccttttattgtataaactgaagggagagaaattaaatagtctaatgatctcaagttgatttcgtgagataatataactacctttaagtaacatttaaaagactaacagaaattaagagcagttcttaaaaaacagttgggatatcctattaatttatctaaaagtgaccaaattccaagattacttaaatagacttgaaaaggctcttggggtaaaatccagcaagtaagataacggagaaagtgtcccaaatacctactctaaaagaagcttcagggacaccattgataataaatcctatcaatattagcgatacaagggtttttacaaagcgtaaagagatgatttaaagcaattttgtgaccaaaaccacaaaaaatatccccaacatattttttgttgtaaataaatacacatagatttttaaataatgcaaccaataaaaatgttttagatatgactgtggtgctcagtgctatatccccagtacctagaataacactgagaactggcacatggtagacgagtaagtggttgttgaatgaatgagtgattatttctgtaccatcattgaattgttagtaacaaaatgcagtttacagccacttacttgtgacgataacaatagtgtctaaagtaaacacaccctcgcttttccctagtgattctcctgttcagccagtttaaaagcactggcttagtcaacctccaggaagaatggacatcatattgcactggaaacgcatctttattctgaggcctctagctgatgagaatgttgctgcttaagtacaatctgtacctcctcttcccttcatcccagttctccctcctttttctgcatcattaagtttctcccccaactggcttatttccaacatgttataatttctatcatcttcgaaaacaaaacaaagcaaaacaaaacaaaatcactcttgaccctgtatatccctcagctactgcctcagttctctgcttgccttactatgaacttttgaaatttttgtccatacctgcagtttctagttcctttcttcctgttctttctcgagccggttccaattaggttttcatctcctgctccaccaaaattgtgcttaatatggtagctaatgactaccatgtcactaattccattggtcaattctcagtcctaatagtgtttgagtggaaggcagcatttgacataattgacccctcactcctccttggggcactttattttattttattttttttgagatggagttttgctcttgttgcccaggctggagtgcaatggtgtgatttgagctcaccgcaaactctgcctcccgggttcaagcgattctcctgcctcagcctccagagtagctgggattacaggtatgcaccacgatgcccagctaattttgtatttttagtagagatggggtttctccacgttggtcaggctggtcttgaactcccgacctcaggtgatctacccgcctcagcctcccaaagtgctgggattagaagtgtgagccaccacgtctggccgggacactttctttacttggcttctctttcttcacctggtaagttgggtggcttccaggacacctgattctcatggctcttctctctttcctggctgccccatcctcagtctcctttgctggttcttcctcatcttcctgatgacggcaggttagagtgctcaagcctcagtcttctgaccacttctttttttctacactcacttctttggtggtcaatcttatccagtctcttcttcgctttaagtactatctatacactgaaccctctcaaatttgtatattcagcccagactcttccctgaactccaaatccaaatatctgtttgcctactcaaactctctacttgaatatcagataggcatgtccaaatctcagctcttgatcttcctcatgcctgcaaaaccaactcctcccataggttccaccatctcagtaaatggcaactttatccttgtagtcgttcaggacgaaattatgcagtcatctgtgattcttctcttccatacttctcagccatttcactagaaaatcttatagactctgaattcaaaatacagtattatctaaattctgatcactgactattaatttattgtctgtcttctcctactagaatataaactcccagaaggaagggattttgtctgttttcttcaatgctgtatccatagcattacccaacacataataaacattcaatgaatatttactaaattgatggaagtttggccagttctttaaaccagagggtcacaccaacaaggattggagtacaaagtaaataggtgaagtagatttagtatacagcacccaccagggtgtctttctggattcaactaaacattcagacacgagaaactgctgccaggggcggtggctcatgcctgtaatcccagcactttgggaggccaaggcaggtggatcacctgaggtcgggagttcgagaccagcctgaccaacatggagaaaccccatctctactaaaaatacaaaattagccgggcagggtggtgcatacctgtaatcccagctacccaggaggctgaggcaggagaatcgcttgaacccaggagacagaggttgcggtgagctgagatcatgccattgcactccagcctgggcaacaagagtgaaactctgtctcaaaaaaaaaaaaaaaaaaaaaaaagacatgagagactattaagaccatactgaacaccagtctactcagaaggatgtaggacagaagtcagagcttgctggcaggacagtggctgggcagtggcagtgggcatccttgcagcagcagtcatcatagccctcagtaagctatcctttcctcaggtaacagctcaggcaccaggagatgagatctgcactggtgagatcagagcttaaagtccccttgccccataggaaccactgtcttttgtagtactctgtatacctacttctatgatccctgcaagggataggtagtgggttgaacagtgccccccaaaaaggtatgtctaaatcctaatcccaggtatccatgaatgtgaccttacttggaaataggatctttgcagatgttaactatggatctcaagatgaggtcaccctggatttagactgggctctaaatcctatgattggtgcccttataagagaaaggagaaggagatttgagacaaagacacacagagaagaaggctatgtgaagacaggcagagattggagtgatgtggccacaagccaaggaaaatggagaattgttggctcccctagaggccgaagagggtatggcatggcttctccctcaggaccatcctgctattataacaccttgatttttaatttctggcctccagaactgagagataataaatatgttgttttaagttactagatttctggtaatttgttatggtagctctaggggattaatataggctataacagttatcactgcactctgggaagcccaaagtattggcatcgtcatcaggtatttacagatttttcattgtttctctcagtccagacacagtttaccaattgggtcagtttttattataaccagcgttgcctaataactggtgacaaaccacttatctgtttactaaggcagttaattaaaggtcaaatcctcatgcagcagagtataggtgtacacttgtgtgagaggtgggaactgtagggaactagagagtgctcactcctggcaaaacaggaagcttccacttagccccagtggatcgtggctacgtgaggatgccagttcaaggttgccagggcttctcattctcccgagagaatccaggtttttaaaaaattggttcaaacaaaaagtaaaccagccacaaaaacaaaacctccaaaacattgggctgatcaaacaaaacaacatctttggaccaaattccagtccatagcttccagtttacaggtgactcctgctagggttttctgacttgactttgcaaggttttaaatttttcccttaaaaggtagaacattcttcctttttaagaaagatagagggccaggcacagtggctcatgcctgtaatcccaggactttgggaagccaagtagggagacaagcctgggcaacatggtgaaaccccatctctacaaaaaaaaatacaaaaattagccaggcgtgctggtgtgtgttggtaagtcccagctactcaggaggctgaggctggaagatcacttgagcctgggaggttgaggctgcagtgagccatgaccatgccactgcactccagcctggggacagaacaagaccctgtctcaaaaaaaaaaaaaaaaaagaaagactagaaatctttgttataacttttttctttatatagagacttccttaaaaggtcaaaacaagctttgaaatgactatacagactttggctgtacttttctaagtttttgttgttgttcattcaatttcttcatattatcctatccatttaattaacatatttattaagtacttactgtgtaccagacactgtgtaaaacaagtaagatacagctcggtctgcaagctgttcccatttaatttggttggacacgagttatggtttctttctttttgcttgtttgttttgatacagggtcttgctctgtcagccaggctggagtgtagtggcgaaatcatgactcactgcagcctcgacctcccgggcccaagtgattcttccacccctctcaaagtgctgggattacagttgtgaaccaccgcaccgtcccagctcaaattatgatggggttttttgttgttttgtttagaaatgtaggttatattgatccttaaatatttagagctggctgggaccttaagttctacccttcattttagagaccaaatgtctggccagggtcagacaaccaggtagtatcaaagccagtactctttctaacctgtcataatattgatatgaggcacaagaaaatatagctgatctttctgaaaacacacaatttctgaatatttttaaatgtgtagtcaattaattgaatttttttctttttctacatgtatttggtaccaagtagctgcctttgcgaggattttaatcactcagagatgtttctagggctaaaaatatcttccaaatcatctgaatcacttccttcattttgactttccagagattttcagtttcatgacattcgtgctgtgagacagtttgaatgcacagacatgtttcaaagctctgattctctttgacagccactgcaggaatcttttcaagaagtttatttaaagaagattctctgctttttcatttaaacttaaggtcctttggatagaatctggtaagctcttgcgtgcagagggaaatgagttgtggagactgataatcctgttctgagcattctgccaaggagagtgaaataatactttattcaaagagggaagggaagtgtaatgagcacaccatgtttaagtagaattcataagtgttttaaaattccagtgtacttcaaactcaataacttactcttattttatttttgaattcacttcaagttgttaagtgggtccaagtgcagaatgctttttacttatttgaaagggccatttggtcttctattagctaatacttgcatcagcagtacaatttttcttgagttttttgatttgtgcattttatgggcctggcatggtggcttatgcctgtaattctagcactttgggaggctgaggcaggagaatcacttgagcccaggagctggagaccagcctgaacatcacggcaaaaccctgtctctacaaaaaaatacaaaaattagccgggcatggtggtgtgcacctgtaatcccagctatttgggaggctgaggcaggagaatatcttgagcccaggaagcagaggttgcagtgagccaagatcatgccactgcactccagcttgggcgacatagtgagactctgtctcaaaaaaaaagaagactaaaaaataagtatgtgaggtgatggatatgttaattagcttgatttaaccatttcacgatgtgtgtgtgtgtgtgtgtgtgtgtgtgtgtgtgtgtatggaaacatgttgtatagcacaaatatatgcaatttttaattgtcaagtctctaaattaaaaaaataaattttaaaaaaagtaaaagaggatttgctcatttgctggcaatactgaatgaactactgtgctttattagcaattattcctgtgctttatttagaattatttgggccgggcatggtggctcacgcctgtaatcccagcactttgggaggccaaggtgggcagatcacttgaggtcaggagttcgagacgagcctggccaacatggtgatactctatctctactaaaaatacaaaaattagccgggcatggtagtgctggtctgtaatcccagctactctggaggctgaggcatgagaattgcttgaacccgggaatccgaggttgcagtgagccgagatcccgccactgcactctagcctgggtgcaaagagagagactctgtctcagaaaacaaaaacaaaaacatacttactgaattcctactatatgccaagctctatgctaaatactgggatgtgacagtgaacaagatagacatgttcccgccttcatgaatcacaagatttaaacacagaagaactagagtcaaaatgttttccatgtttggggacatttctctccctctaagcactcttcccctaccacacacactttgacagattctaaatttgcattgcctgctctaagacaaacttgtgtatataaatagttttgtaatggtatatggatggaaagctggtgtcaaaccagagattacattttagagagtatacattttcacatattcccaagttttggttatgcaacaaggagctgagacattttcttttcttttctttctttctttctttttttttttttttttgagacagaaactccagctctgttgcccaggttggagtgcagtggctcactgggactacaggtgtgagccaccatgcccggctaatttttctatttttttatagagacagggtttcaccacattggccaggatggtcttgaaatcccgaccttaagagatccgcctgtcttggcctcccaaagttctgggattacaggcgtgagccaccacacccagccgacattttctaataattaaacccaaattcaagttactgtatttttctcttcattgtcttaagataattatacacaggtattcacttcttcctccctccctttctttctttttaagtttgtcatgctagcatgttccaccatcaatatcttttcttttaaaggatttaaagtgtatttctcatctataatgtttgtatttcccctcattttctgggagaaatggaatgccaactacagcctctaacagcaaagccttgtttccgtcacaagtagctgttttataccatttccccttcttgtgggcttaggggacctttttcttccttctcattgaacctcaggaatggtgtctaggtaagtgccaagccaaagaagcaagaaatatttaaattccgctctccaggcagtttttataactgttgagaatagattcttgtttaggaaatatggcttggtttgttaagattgcccttttctcccaaagtccaccatatttcagttacttatacattttaaaaagcatgtaaacagcttatgcaaatgcaacattttgcatttatccttcatttatccagagagcattttgaagcatattgagctttgcagcagagcctctatgtagccaggatagatgctgtgaaaactccatgtgctagaggtcacctgcctcacttctgtgagagcccctcaaatctctgcgagccacctattgagtaggtaagactaattggctagtgggtttgcaggcttatggaaatattgttttaactttaaaactggaatgagctctttcaaccataagaaaaaacataatagatccctaagtacccacgacccagatttaacagatgttaagattttcagcaacataaaattttataagctgttagctgggtgtagtggcacacacctgtaatcccagttacagtggaggctgagatgggaggatggcttgagcccaggaggcagaagttgcagtgagccaagattgcgccactacactccagcctgggtgacagagtgagaccctgtctcaaaatagatgaatgaataaataaaaataagacattttataagctaaaacttagagctggtgggaaccaaggatgagacaaagtgatggaggagagaggttggaagtaggtgccctaactcaagccagaaacaaaacgagatagaaaaactctgagagagacccagggactctcaaaccataattgtatgggctcatttggatcagaggtgagcacctctcctgcttcagaaacccctaagggcttccctttagagtaacaggataataattggtgtttgattgatgaccccaaatgatcaataaaagactgaatatattctattcattctactgctggacagggaaagctagcgtgcagccaatttgcgtaaatgtaaaaggtttttaaaaatcaagttttgacactcagagggggcaaagttcagttttacagcaaatttgacacatttctctgtgatgcttcatagcattagaaagagtaagaagtcttcactgggaacacggttgtctttgaatttttggctttatttatttatttttgagacagaaaagagtaagaagtcttcactgggaacacggttgtctttgaatttttggctttatttatttatttttgagacagagtcttgctctgttgtccaggctggagtgcagtggctcgatctcagctcactacaacctccacctcctgggctcaagcaatcctcctgcctcagcctgctgagtagctgggactataggcacacactgccaggtgtggtttatttttgtatttctttgtagagatgaggtttcactgggttgcccaagctggtcttgaactcctgggctcaagcagtctacccactttgacttcccaaagtgctgggattacaagcatgagccgctgtgcctggcccccacactttctaaaagtaaactttttactgaagaacaacatacatgcataaaagtacctaaatcggaagggatgtgtgtttatcacatgcacacatccgggtacccagaacaagaagcaatattctgtgcacatcagaacccccccagcaacccttgtaactcctttgagtcatgatatcatgatagttactctttttttttttttttttttgagacagtgtcttgctgtgtcacccaggcagggtggagtgcaatggtgcgatctcagcttacctcaacctctgcctctcgggttcaagcgattctcttgcctcggtctccccaagtagctgggattataagcacatgctaccatgcccagctaattttttgggtttttttgagacagagtctggttctgttgcccaggctggagtgcagtggtattatctctgctcgctgcaacctccgcctcccgggttcaagcgatcctcctgcctcaagcctcccaagcagctgggattacagacatgcaccaccatgcccagctgatttttgtgtttttagtggagacggggtttcaccatgttggccaggctggtctcaaactcctgacttcaagtgacccacccgccttggcctcccaaagtgctgggattacaggcatgagccaccacgcccagcctgtatttttagcagagacagagtttcaccatgttggccatgctagtcttgaactcctgacctcaaatgatctgcctgcctcagcctcccaaagtgctgggattacaagtgtgagctactgcgcccagcctactcttgacttttaatatcagagatgagtttttattttgggaatttttgatataatatgatccagattggggagaaaatgctactgtggttcattgttcataatttgcttttcgagtgttgaaatcctgagtattttttttttctgtatgtagatgttcaagttcactcatctaagactccttacccggagtggtgtttgcataatgtgatggtgatgatgataacaaaaaaacaacaatattaattttaaaccatgaattgaggagggacaaactacttaacctctctgcctcagcttcctctgtacaatagtaataataattctatcttcacagagttgaggtgagaattataatgaaactgtgaagcacttagatggtacctactacctagcaaggactcaattgtgtgtgtgtgtttgtgtgtctgtgtatgtgtgcgtgtgtgtgtaataaatgagcccaacacaggcaagggggagatgtgttattaggtcttcatatatcgcacatttttattttactattgcgtgatcacacacagattgcagaaggctccactttgtagataaaagttcactaggtcattgggtaaagaggcatttgctttcccaggaaactaaagaattatgtagggtctgcttagaggagaaaaagcatgaggaggggaaaccacagtgtttgagttgacatcaatttagtttccagatttgatcagtctgtagaaagtgctttgtgtttgtttatttaaacaatacttatgggtcacacatacacacaagtaacctagtgaaatctgaataagggatggaggaggagggagagaaaaaaataaaaaataagtaaattttaaaaaaacctgaataaggtcagaggattgtatcaatgtcaatttcctggttgtgctatggtaccatagttatataaggtgttagagaaaactgggtgaagagtatatgagatttctctgtactgtttcttacaactgcttgtgaatctatgataatctcaaaatagtttaaaaaataagttctagtgttctatatagcactgtaggacgactagagttaacaataatatgctatatgctttcaagtagctaaaagagaggatattgaatgttttcaacaaaaagaaaagagtttgaggtgataaatatgctaattaccttgatctgatcactatacattgtatgttttgaaacattactatgtaccgcataaatatgtacaattattatatgtcaagttaaaattttaggccaggcacagtggctcacacctgtaatcccagcactttgggaggccagggtgggcggatcacctgaggtcaggagttcaagatcagcctggtcaacatggcaaaactccgtctctactaaaaatacaaaaattagctgggcgcgtattcccagctactcaggaggctgaggcaggagaatctcttgaacccaggaagtcgaggttgcagtgagctgagatcgcaccattgcactccatcctgggcaaccaagaatgaaactccatctcaaaaagaaaaatacagagatttaaaaaatacttatggaggagctacatgctttgagtccagggctgccttaggctctggggatacagtggagaaccagcaagacacattaacgccctcagagaagatgaagtaggggtgagagggggccttgagtttgctttaaaagtgtactttttaaggtattgcattaaatcatttgaaaagattccttgaatatagaaatgattatccaaaaagtctccacgttctcaaggaagtataaccaatcgacattcataggatacccatatacacactaaatttagtaagtagcagtccttcagggttgggattaagtaaaagaaatattgtcctaatggtgaggactgttaagtgttagaatggaaccaaagaataggaaaaatgacatcctgtgctgaaagctttaaagaggctgaattcacatcggtctttgtaggtttagatgtgtttctgtctgaaaaaggaatagataatcccttatatttttataatcctatgaagttcttgggtgtttgtttgtttgttttttgagacagagtctcattctgttgcccaggctggagtgcaatggtgcggtcttggtttactgcaacctccgcctcccgagttcaagcgattctcctgcctcagcctcccaagtagctgggattacaggtgcctaccaccacgcccggctaatttctgtatctttagtagagactgggcttcattatgttggccaggcttgtctcgaactcctgacctcaggtgatccacctgccttggcctcccaaagtgctgaaattacagcaccgagtggctcactgagcgcagtgagccactgcgcctggcctgaagttttatatattaaaattataaaagcctttggtgaagtgaggctcctttttattttctggaattaagaaatgtacatgaggccaggcactgtagttcatgcctgtaatcccagcactttgggatgctgaggcgggtggtgcacttgagcccaggagttcaagaccagcctgggcaacatgatggaatcccatctctgctaaaaatagaaaaaatagcagcgtgtggtggtgcatgcctgcagccccagctactcaggagactgaggtgggaggatcacctggtcccaggaggtcaaggctgcagtgagctgtgatcgcaacactacattccagcctgggtgacagagaaagaaaagaaaagaaatatacgtgataccctgctgatatagtggaatccatcgtctgaggaagtattctataaactttttcaatctgccacacatttccagatatctaaattttccctgacacagactggagggatggataggggcaggattttatcttcagaacaaaaattaactgaatgttggttaaggtggccatataatttattgcttaaaccaggacacttaagacaaccctttgtaaaaaaacttttgttttctttttttttttttccccgagacggagtcttgctctgtcacccaggctggagtgcagtggcatgatctcagctcactgcaacctctgcctcccaggttcaagcgattctcctgcctcagcctcccaaatagctgagattacaggtatgcaccacaatgcctggctaatttttttgtatttttagtagagacagggtttcaccatgttggtcaggctggtcttgaactcctgacctcaagtgatctgcccacctcggcctcccaaagtgttgggattacaggcgtgagccaccgcgccaggccataaaaaacttaattggagtttgttctacatgcagaatgatgaatcttctgtctatgacacctgtgaaaccagcacctagattgagaaacagaatgttagtaggagtcttcaaaatcccttgtgtgttccattgtaattgctgtatccttccccacgaaggcaactactatcctgacttttccaatgcagagatgagttttgctggtttctatacttcatataaattgaattacactatatacttgttaacgtctggcttcttgagattgacattataggttgatccatattactgggtctagttctagttgtagatcgtttctttccatggtgtaaatttatttattcattctattgatgatgggcatttgggggagtttccaggttttggttactataaatagtactgctaataatattctagtatcttttgatgatcatataaatatttctttttggcatatacccgagagtgaaattgctggacaataaggtatgcataactttaccttaagtagatactgccagttttccaaagttttgttctcattaaagcactcatcagcagaacattagagttctgactgctgtatattcattttgatacttggtgttttccaggtttagccattcagatatgtggtagaggtattctcattcggcttaaatttgtatttctctattgcatggtttaaatttgcatgtttttctgttcctttctttttcttatcaaactaagacttttttttttttttttgtcttcctctgttgcccaggctggagtgcagtggcgcaatctcggctcactgcaacctctgcctcccgggttcaagcgattctcgtgcctcagcctccagaatagctgggattacatgtgcatgccaccccatgcctggctaatttttgtatttttagtagagatggggtttcaccatgttggccaggctggtcttgaactgctgacctcaagtgataccccgcctcagcctctcaaagtgctgggattacaggcatgagccactgggcccggccaaactgagacatttttaagaagaaaggagacaacaggcataaatcagattgttaagattaggaatttggttttggataagtttgagatgtctgggaagcaaacgccgtacggaaataccaagaagacattggattatgcagatctgaagcttagaagacagttctgggctggagatataaattttttggagtccctgccatggagacagcatttcagtgaaagagtgaatgagatcacccacaagagggagtgcagagggagaaaaagccctaggaccgagcctgagaggcaccaaggttcattcacaagttgggagtgaagaaaatgccagcaaaggaactcctccaccgtcccctagagggagccactgagaggcaggggtaacatggggaagaggggagaagcaaaagccaagggaaaaaggtttcaaaaagggagtgtccagtgtgtcaaactgttcattttgtgttgtttaaaaaacaaaacaaaacacattctgtgtcctttcgtctttccctagccatcatcgtctacagactgccgtggacctggaaatgcagcaagctcctgatgaaatccatccatgcagggttaaatgcagttgctgccattcttgcaattatctctgtggtggccgtgtttgagaaccacaatgttaacaatatagccaatatgtacagtctgcacagctgggttggactgatagctgtcatatgctatttgttacaggtcagtatttcagtgtatttacaagcaagttataaaaacaattcagagactgtaaatgttttcttttctttttttttttttttttttttgagacagagtctcgcttagccacccaggctggagtgcagtgctgcgatcttggctcactgcaaccactgtctccagggttcaagtgattctcctgtttcagcctcccaagtagctgggattacaggtacccaccatcgtgccaggctaatttttgtattttagtagagatggggtttcaccatgttggccaggctagtcttgaactcctgacctcaggtgatccgcctgcctcagcctcccaaagtgctaggattacaggtgtgagccaccgcgcccagtgactgtaaatgttttctaaacattctttacatttgtttctattataactattttcccctcagagagcaccagaattgcagaattcacagaacaaaataataagaaataaagatttcttatactggatatgacttttaatctggattctctaaaaaccaacttatactctgctctatatcttaatatgtaaaattaagaaatatcaggctgggcatgctggctcatgcctataattccagcattttcgaaggccgaggtgggaggatcatttgagctccgaagttcaagaccagactgggcaacatagggagactgtctctacaaataaaggaaagacagagagagagatcgagagagagagaaatcaagagagagactgatctaacaattagcaataaagagaatacctatttaaaaatctgtgggtcctggctgggcatagtgcactgctcactcctgtgatcccagcactttgaaaagctgagaccagtggatcgcttaagcccagacgtttgagatcagcttgggcaacatggcggaacctcatctctaaaacaaaaacacaaaaattagctgggcagggtggtgcacacctgttgtcctggctacttgggatgatgaggtgcacagctcccttgagaccaggaggcagaggttacagtaagctgagattataccattgcactccagcctgggcaacagagccagaccctgatctcaaaaaaataaataaataaaaatctttggggtttaattaaaatggttcccagaggaatataggcttaaatgcttttattatattttttggaaagaaaacttaaaatacataagctatttacttaggtaactataagggaacagcaaaatataccaggaaaagtaaatcaataaaggtaaaaaaaaatccataaataattcattttctattgtggtaaccaattaccacagacttaatggcctgaaacaacataaatttatgacctcacagtacctgtacatcagaagtccagattggcttgtctggtttctctgctctgggtctaacaaggccagtatcaaggtgtcagccttccagggctctgattgggagactagggtagaatcagcttaaagcaaattcagcttgatggcagagtccaggtccttgtatgtgcaggactgaggtccctgttcccttgctggccatcagctggggctgccctgaaccttggagtcctctcttccttgtacccggctcccttcatctccctaccagcaatggacatccagtccatctcgctggcttggaaactctctgacttctccttctccttcctcctcatctcttctcctcaaccagataaagttcttacctaccccaacccctagaggttaccattctcccggtgtttattctcattctctgctttttaaaatactttaatcacatactgtgaatcaatatattgattaaacaagatgtttaattaaataatattgattaattaaacaagatgtttaaatattgattaattaaatcatatattgtttaattttgctttttaaatgaaactttttttaaaaaatggtctcatatatattctattgcaacttttttttaactctactgattaaactgtattgattcctctggctatagttcattcatttttacttttgtattccactgtataaatatgccacaaatttacttacctgttctcttgctattttcagttagaaactatgctgcattgaatattcatatatacatctcctggtcctcacatctaaaggtttctctgggcatatacatagtagtgaaattacaagctcaacctaaaaagataatgctaaattgttttcccaagtgattgacccagattatattcctgccagaagtttatgagttcccatatccttaccagcttgcaccctctttaaactttaaatccttgctaaactagttggtacttaatgatgtattcttgtagttttaatgttcatttcacttgtgttttatcttctaagacacacctgtttgtgtcttttgtctatttaaaaaatgtttctctttttcttaaagatttataggaattctatatcgaattctttttcatttatatatattgctatatcttctcctagtttgaagcttgcattttctctgttgttaacatcttttgataaacagaaattgtcaattttaatgtaaccaaattaatcatcttttcctctgagactatcattctttgttttgttttcttttggtgacttgtttatgaaattcttctctaccctgaggtcaaaatatcatcttatgctttctactaagagcattaaaattttgtcttttacttttctactctagtacacagaaaaaacaaaccaaaaaaaccccaacaatatgaaaaatagttttgtctttgatatttaagtacttacttcatctggaattaattttaatgtgtgaggtgatgtgattcaacttcatttttttccagatgggtaaactatcttcccatcaccatttattgaatcatctctgctcctactatttatgtacaaagccaattgcatcctatagagtatcttatcctctgtatcctagccagtgcagtacagaattcaagtgtgtagaagtactgaagtatgtagaagtgtatagaagccataagaagtagagaagtagagagaaaaatctttgacttttggggccaggcacagtggctcatacccataattccagcactttgggatgcctaggtgggaggattgcttgagctcaggagttccagaccagcctgggaaacatggcaaaaccccgtctgtacaaaagatataaaaataagccagctctggtggtgcacacctgtggtcccagctactcagaaggctgagataggaggattgcttaagcctgggaggtcaaggctgcagtgagctgagatcccaccactgaactccagcctgggtgacacagcaagaccctgtctcaaaaaaaaaaaaaaaaaaagaatctttgactattttttattttaaagagaatgcctgccaaaggctaaaaaagaattaataaataaaaagaatgcttctaatattttaccattgagtacagatgcgtcacatttcctcctacccctgtttgtgcaaaggttttgtttttcttcttaaatcataaatggatgtggaattttattgaatgcttttgctatctctgctgagatgaatataccttttttgttttttttttttgagatggagtcttgctctatcacccaggctggagtgcagtgctgccaccttggctcactgcaacacctgcctcctaggctcaagcaattctcctgcctcagcctcccgagtagctgggattacaggctcgtgccacaacatgtggctaatttttttttttttttttttttttagtagagacggggtttcaccatgttggtcaggctggtctcgaactcctgacctcaaatgatccacccgcctcggcctcccaaagtgctgggattacaggtgtgaaccatcacgtccggccaatgtttatttattttttaattgatgtataataatcataacatatttttgtggtacatatgatattttgataaaagtatacaatgggtaatgaacaaatcagggtaattgggatacccattatttcatttatctttactttgtgttgggagcattccagttcttctcttctaggtattttgaaatatacaataaattattactaacggtaaacaccctaccttaagttttcttctttaacatcttaatgtagtcaattatataaatatattctatttttaaacttgggtgagttaaaaacatatttgtctcaaaattctcttttgctgtctgaaatatccagattcatatctcgcgttgttgtctttgtgctaaccgagcttctcagaaatattatttcacaacttcatggctttgcttagtgggaggaattttggcacctggcttcttccttgctcagatccagaggacaggtagtgtttaagaaaacaggatttgcaattaggaagacctcagtttggattaggttcatccatttgatagttggtgaccgtggaccaagttacttctctgaatttcttttgcacagctataaatcaaggattataatccttcacaaaatcataagaatcaaagccaaataatgcatctaaaggtccagcccagggcttagcacactggtataacacaaactagctgttgttattataagtgtaaatcctgtggtatgcccctttatgacctgcagatgacattttccacttctactattgatcataggtaccttcatggttaagaacatgcattttttgtcattgcaattttattcccaaatctattcatatattcagcagtgaaccgaatacccgttatatgccagataccttgctaggctgggctgtgggtgatacctgttccacaagacaaatgtgggctcaaagagacatgctctctgcccttgtaaagcttgcagggaagataggcaattgagtatttggtagataggaagtgttctgggaggcctctcatatagtatgtgagagctctcatataggggataaaggaagtcacacctcacaccaagacctgaagccacacacctggtgtagaaagggcggagagtcttctaggtggatggaatagcatgtggggaagagtttgtggtatttgaggagtagggaggagaccaggctgtccagagcagggcatagaagatgaattggaggctggacaggtataattatagggagactagcttgcaggtgtttatggagttaagatgagaaacaatggtggcctagaggagtagcagtagcaatgtagcaaagtggatagattctaaagatatttagcaggtagaattaatgcgtgatgtaaagaatgagagagagtcactcacaggctttattgagcaggtgggtagccacaagtttgaataagtgggtagatgagaagggaaacattggaggggaggagagggctggaggagtgttagatgctactgaggagataagcaaaataaagtctgaaaactgatcattaggcttagtaacctggaagtcactaatgaccccagaaagcaatttcctggcttccttcctaggagccagactgcaatggattgaagagggagcagaaggtgaggaaacagagtggtaactcagtcaagaggtttgggtgagaggggaggagacagagagggtgacaattggacaggggcaagagtccaaggaggcatttgggtgctcttttttttttttttttgtctacttctgctttttattgtgagaagtttgggcttatggaaaggctaacaggatggcaccagtaaagaaagagacactgtgaacactggagagacacagtgatgtatagctaggtccttgggaagcaggtcacagagcacagctgaaaaattggaggacataatctccaatgtaattgaagaaaagaattgttggcttggggtgatttcttgctttgttttgtttggtggcaggaaattgaggctcttctctgaagttgcttctgtttttcccatgaggtgatagtaaaatcatcccccaagagtaaggaggcacatcggagagtcagacatttgaggatgggggagaatggagagctcattgataaataagacaatagaggtttgctgagcagggttgttgaactgctcataatcatgaacttggagtgatgctagtctctgtggttgtggtttactccagtattacctagcagaccaggggtagtcatgaagatggctgagccagggttggggtattgccaagttgatgtgatgaaaagacagtgtagcaaggagatgtagaatattggcaggagacttaatgaccagtttgagtgtctgttacgtcccttataaaaaaactatgggcatattgtagttggtgctggttagatttatttatttatttatttttaatttttttttaacccctggaagaaaagtgtcattacactggaggaatgcaatttggcaatgacctaagacagcgtttggtccctagaacagcagcattagcatcactagggaaattagaaagacagattctcagcttccaccctagatccactgaaccaaagactcgggctggggcccaacaatctgtgctttaacaagcacataaggtgattcagattagtgctaatatttctgaataattaatctaagagaaaagcctatgaatggtcaaaaagttggacattaacagtaatattaatgaaaataaatgtgagttctttaacattgggagcttgtctgtcttgtgtagcattcccaacactccgaacatctgggtcataagaggggcaaaacgtatgtggaatgaaggactgaatgagtttataaaatagtacaaagatgaaggagagctgggaggagcttccatataataatctacagtttacttgaaagctcattaaatctacctgtaccctaaaaaaaaaaaaaaaaaaaaagcaaaccatacctactacaaaagctagccaggtagatattttctggtctcattaatgtcttttgcaataagagcttttgttatgtctaaaagcttacacacactaaaaaaaaaaaaaagaaaacaaaagaaaagaaaaaaaaccaacctcaggccagacatggcatggtggctcacgcctgtaatcccaacaatttgggaggccaaggtgggaagatcagttgaggccaggagttgaagaccaacctgggcagcatagcaaggccctatctctgtaaaaataaaaacaaaaaaactcatctgtttcataaagtgagaaactgccatagtagtatacatttatatctttaagaatagtaataattaactgagaaatgcccaggcatttaagatggaaactttattctattctattctatttatttatttatttactgagacagcgtctcaccctgtcgcccaggctggagtactgtggtgcaatcttggctcattgcaacctctgcctcctgggttcaagtgactttcatgcttcagcctcccaagtagctaggattacaggcccatgccaccatacctggctaatttttgtatttttagtagagaaggtgcttcaccatgatgtccaggctggtctcaaattcctggcctcaagtgatccacccacctcggcctcccaaagtgctggaatggcagacatgagccactgtgcccagccaacatggaaactttaaaagtaaacttttattgtctatttctaattataaaagtaatacacattaatgttaaagtttataagatgtagaaagatataaagaaaaaaccctggctattctgggcacactgcctgtggggtattcctgttccacaaggagtagaacctctgctgctgctacaaattaaataaaaaaacaaaaaatgaaaaaacccactgatactgccataatctagagatatcattagcttttggcttattccctttaggcttttattatgcctatgcaaatgtagatatagatatttaatttttaaacataattgggtcatactgtattttcactttcatctctaagtaataactttttatgaaagtttatttttccttagctcttaagaacttccactgtgttgaagaacagcttcctgtaggtgatgattcctaaacactggggcactttgtttgcatatagttggcatttagtgtgtttgtagactatatataatggaatattccactaccttctcttttgagggttttccagactgtttatccatatctctagaataatttgagtgaatcaacagcagtcattttcaaacttcaacatacgtaagaatcgtctgggcagtttgttaaaaatacagattcctgggccctaatccagaaattggatttagcaggtcagaatgtggcccaggcatctttttattttttatttttttgttgttgttgtttttgttcttgagacagagctttgctctgtcacccaggctgaagtgcacaatgtcagctcactgcaacctccgccatccgggttcaagcaattctcttgcttcagcctccagagtagctgggactacaggcatgtgccaccatgcctggctagtttttgtatttttagtagagatggggttttgacatgttggccaggctggtcttaaaatcctgatctcaagtgatcctcctgcctcggcctcccaaagtgctgggattacagcaggcatccctttaaatgcatgccttctgtgaacagcacttccagtactgacttagagagacaaaaggtcttataattttcggtccactaggttataaattatcaccttcacttgtaaggtagtaagattaagatagttaaaaggaaataatgattatttataaattataagttattataaattataaatatgcattattgcagcattcagaacacttttaatcaaagttaagcattctgtaatgtttttcttttccttttaaatgtaattttcttttgttgcaaaaaatgtttaatggtgaaagtcagatttagggtagttaagttgctcagggatcctgtaagcaaatttctgacctcctacctgcttagactgttgagccctacaggattgtaagagacacacatgacaaattatggaggaaatgagagaaaacagaaagaatcttaggaatgaaaataggagagcaggaatgagaaatatatgtttctatgggtaagccacagaaaagatatgatgatttatggagatatatttgtgctatatccctgagccccattttcttttcctttcttttcttttttctttcttagacagggtctcactctgtcacccaggctggagtgcaatggcacaatctcagctcactgcaacctccatctccaggactcaagcaatcctcctgcctcagcatccacagtagctgggaccacagacgtgcaccaccatgcccagctaattttttgtagagatggggtttcgccatgttgcccgggcttgtcttgaactcctggactcaagtgatcttcccaccttggcctcccaaagtgctgggattacaggcgtgaggcaccacactcagcccccattttcatatagaaagcacaacatggacatcaggaagcttgccctttgatactaatagaatcactgaagttcactgaagaagatttaggaatattctgaaccaccaagagggaaccctctgaaccatttctaatatattcaggcattttggttattaactaaataataaaatatgcaaaccaacctatcaaatgcatttgttattactttttaaatataaattacagaatttattgtattaggatatacttcagaaaacaacagttaatcttggctattcttggccctttgatctatgtaaattttagaatcaatgcatcaaattccaccaaaaatctattaggattttatttaatctatagatgaatttgagaaccgacatctgtataatacaagtcttccaactcattatcctgagcctgtttttttagccttctccaaaatattgcaaagctttatattttctttgtagagttgttgtctccaacttattgctagctccttgctattaaaaatggtatcattaaaaattaattcacttgttgcctctttacaaaaagtgcaactgatctcaagtataaatttatacctagcaaacttgataaacttatgttagtaattaatctcaagattcttttggattgtgttttataatcttatgtgattaataagttttgtttctttttctatcatcatttttttttcttgcttaactcagtagctgagactttcagaaaaatgctgaataggaataggtgataagggatataagacaaatcccttctagatctgagtcatgtcttggaagagagctactctgaaatgcctatagaccataagcagactgtgtgtgagcaagaaatatacttttatatgttaagctcttgaaaatggagcctgttagttcctatagcatgttctgtcctaatataatcagattaaaataatcatcttccattcctagtttgttaaaacatctcatacatgactgttgaatcctaccaatgtttttcaccatctgttttgatgattatatgatttttcctctgcagtctgttaaagtgacaaatcatacaaattgttttgttatcagtttccatttattactacttggtattacacatgagctgattctcagtgtgaattagggcgttggacccctccccctgcctcccttcttctgtctccccattagcccttggatctcaatcaagaaagctgaacagtgatgttagtgctttctccccactctcctctcttttcataattgttttgctaggatggtagatcctaaataggcatctgaaaaaaaatgttcctttaaactcagtaattcagtaaccacaaagtcatctttatcttgttgaagagaggatacttgatgggcaaacgtgtggggtgacaaaaccgtgaaagcgcaacagacttcagtttatataggaaccttgctgtcttctctgcaaagaggtatcccactagcgatttcattatcaaggaaatgaagacaccttttctgcagaattcatttctttctcataaaacaaaaatcaacttcattccacatagctttttaggttgaactgactaaattctgtgtcctaatgtactcggttttagtgatttaaaaaatcttttccttcccttcctacttagcaaccttaggagattggtaaaaacaaacaagtaagtaccagaatgttcactatagtcggattaaggatagcaaaaaccaaacagaaacatccatagagaactgtataaataaattgttatagccttaggatattagccattaaaaggaataaattaggtaaatgtataggtatgaaaaagatttccaagatattctgttaagggaaaaaagcaagatgcagaacaatatgtatagggataataaattttctggaatgatccatgagaaggtgataaaaggggttacattaggtagtggaactggagcgaggaaacttcattttctaccctttggttctatatgaaaggttttgtcatattacacatattgctttttaaataatttaaaattagtttagaacttaaaattaaatgataacctttgcactttttggtgtttagcttctttcaggtttttcagtctttctgcttccatgggctccgctttctctccgagcatttctcatgcccatacatgtttattctggaattgtcatctttggaacagtgattgcaacagcacttatgggattgacagagaaactgattttttccctgtaagttgcatagtcttcttaattgtaatacttaagccacaaaatgttaaatacttgttcactgggaaaatgtaataaaaatataacaaaattttttagatattaaaattaaaaaatattttaaagaatttgttatatcatataggtaatatgatattactaaaagtttagaaggaccaaaaagtctgacaaattgtattactcttatgaaacaactattgaagttatacattccctttcaatcttgttgatatgcatgtttttatattaattgtaattatagtgtacatacatttttgtttcatcctttttaaaaattttaagtgataactgttactggtggagggtgtccaggttcttggcgttttgaacaaagaagtggacaaaacacacaaacaaagcaagtaaagaatgaagcaacaaaagcagagagttactgaaaatgaaagtacactccacagggcgggagtggcctgagcagccactcaacggcccgatagggaatcttcttgggtccaaatagcccctagaggtttcccattggccagttggtgttcactgcatgtaaatgaagtggtggcctgcagtcagtttgattggttgtagaaagcaaccaatcagagatactttcaattttccatccgccatgcagaaaagcggggtttgcaaagggagtagcctcgggtccttttgctacttagatgtggaaagttggggttttccttttggtttagttctaggaagtccgtgtgaattgacctgaggttgcctgcctccagaccctacctgccttaaaacaagtgttacagatgctatattattttcatatttattatttttaaatcaatttcattatatattcccgagtgaattgtagcataatttatatttctccttaatagcaagctttgagagtttacattgaaactgtactagtgtgcattttgagcagataaattcaagactgttttgcatgttgctgtatcatcctgtttgtaattggatacatctcttatttcataggagagatcctgcatacagtacattcccgccagaaggtgttttcgtaaatacgcttggccttctgatcctggtgttcggggccctcattttttggatagtcaccagaccgcaatggaaacgtcctaaggagccaaattctaccattcttcatccaaatggaggcactgaacagggagcaagaggttccatgccagcctactctggcaacaacatggacaaatcagattcagagttaaacagtgaagtagcagcaaggaaaagaaacttagctctggatgaggctgggcagagatctaccatgtaaaatgttgtagagatagagccatataacgtcacgtttcaaaactagctctacagttttgcttctcctattagccatatgataattgggctatgtagtatcaatatttactttaatcacaaaggatggtttcttgaaataatttgtattgattgaggcctatgaactgacctgaattggaaaggatgtgattaatataaataatagcagatataaattgtggttatgttacctttatcttgttgaggaccacaacattagcacggtgccttgtgcagaatagatactcaatatgtgaatatgtgtctactagtagttaattggataaactggcagcatccctggcctgttgtcatgcagtcatttcctgttaattctgggagacaatgatttcacaactagcgggaagcagtcctaaaagtttaaaatccgataaggaatatctgggacagggtttagatcatgactctacacagataccatgatgagagtatattaaagaaatttaggaaagcacctggttcctttctccccatgcctgccttctgctccctccccagctggtttgggctcaaattgtccctggagactagggtttatgttagggtattgatagattagagcaggtggttgaagagatcttctctggtcagacttggaagaatttccaaaactgaagttagccccaagacttccctagggttgatgtactttatgatccagatgctaaacttcttagaatgaaaatatgcttcaacacttaagtagcatacactgccctacaaacctcagagagcacttttccccaagttcttgtttttatttttgaaagtactcacacagcacttactatgctccaaacactcctctaagcactttacacatattagctcattcagtccccagacagacgggatgaagtaggtattgttactgttcccattttacaggtgagagatttgaagcctggggaggctagtaactcaccccaaggtcacacggctcatacatggtgggactgagactcagatgcaggcagtctggcacctcagtctggattctaaccatttcactaagctatttttgtcttgtactactttgacccacccctgaataaacctcaattgctggagtggggtgtagttattaaagggatgctttttaccttttgctgtttgctgtggcagattccccagataaccaaggaaaaggggccacccatacctggaaataggccatagggcccctactactgccaacaagccatggcctaccttgacacttgtttgatcttaaaattgtgtcttggtaacaaaagatttggacaggcatatctgtagctttcaagttaattaattgcaatatttttttcttcaggattttagctgctgaacaactttcagtttggagctaaaagagacctgtctcatggtctgcccttccctggggcaatagctagggtctttcctgatttttatggaattttaggggatattttgagctttgggttctcagtagtgaattgagacttggaggtgacttttcatgtttggagtatcatctctgtctgggatctgggctgacaaattaaaacctagagtagtgcttatgctgaaatgatacttttcattttttggttgatttttttgccttcccttcaattttaaactgaagcattttaatatgggtagaaactctacaccaaatacactaaacattttggtgcttagtggatttctttttaggtaactggtacttacttccaaagactgaatacaagccacactccatcatatcccttaaacttcatgaaaaaccattcaagatccccttgctgcaacactgttctcttcttctctactaaattctatttccaaaattggtaatagagccagaaggatccccagtacccagccctctgcctggcacaaagtggtagcacaattaaattcagtatgggtggagcatggtacagtcttggtgccatagaaggagtagttgcatagtcacacatcatttgataagttggatgttccattacatagaggaacacaaaattccagggtttttggaggaagggattagatagtgactaagccgccagaattgaggtggccattcctttttgtataggctaagaaacaggttatcagtgaaaagttaattatggctttggcactagaatagcactgttgcaaagtatttaagcaccccccatctcagccctttattttatctttcatgtgggctaatgtgaggataatcttacagatattataggaatttcttttctatctttatgaaaacaacgtatataaaatatatctagaaaacctttgtttgagactcttatttaatgggcttttgattctaatgataattgtacctttatctttcaaaagctgatatttcctacctaagcatctcccgagaaaaatatctcattaaaaagcccataaataataggggagaagaaagccttaggtatcaattccaaaacagtgattgaaatttcccaaaataattatggcttctgtcatctccagagataatctggcttggtttaccccataatctaatttcagaaaagaaagctttattttaacactcatctgaatcaacattaaagccttttctctcaaagcgtttattgagaaactcaaatgaatatactttttgaattactgtcatcaaaagtgtacggcttcctgtgctgcttgtgtcaaatggaacctgccctctaaagcactttctttcctttacttgcgtggtttcatgtaagctgtgctgtttagaaacaacatctcagactttacaaagaaatgacaaagaaggcaattgcactttttaagggatatcgacaagcagtttctgttttctaaaggacaaaatacagagtgtgtgtcatttttaattagattctttcccctgctgagttggaaattccagtgcagcactgattgaccacagttgccaatctaaaagcacaaagacagaagtaaagctttatgctaattttatttcaatatgatagaaaatttatcttggtatgtccttttttagataactccagcaggaaactgtaactgctatgtctttaggaaaatgtagaagaaagaacattattgttctttaattcctacaaggtactcgaaaaccttaagtgaaaaagatttctatctttttatcttagcgcatttatggaaaaaatattaactatcctgaatattttataattttgtaggaaaaatatgcatctattttttcttgacttcttttatatagtaataaaagttattttggaagctc

SEQ ID NO: 119 - DNA, 91950 bp, Homo sapiens
gtgctgcctgtggggacgctggctggtgctctcaaaggaggactctaagggaggcctgctgaagcctgccaccaccaccaggttttctgtaattggatctgcacaggggcctcagggagtgcagtatgaaaacacccatttccatgcactcccaaccaacacgctgaacaatctgtactcttggtgagaaagacccatgagggactgaaaattctttttctacgtgacactgagaagacagtcacatggtttgggtaagtctcactagaaaaccaatctcctgtccatacagccctctgatgaaactcatttctgctaaggcagaggtgagtatcctgaacacagcgtagcattattttagacagatgagtgtgggtttcagtaactggatatataatgaggcaactttgacatattttacaggaatgcaaccttttgtacgtaatggaatgatcagaaagtcagttcagcactccaaacttaaaaggagtattaaaaatgcttcacaattgactttttttcttcttacgatcaatgaatagataatgctacattattatgaactaaagcctgtggtttacattaggattcacttttgtgttttacattcggtgggttttgacaaatgcataatgtcgtatgtccacccttacggtatcatgcagaatagtttcactgcctttaaaagtctcctgtgctccatctggtcatccttcccgctctctttcccagccctgacaaccactgatcattttacggtctccattgtttcacacagctttttcagcctagcttcttcacttaacaatatgcacttaagttttctccgtttgttcatggcctgatagctcattactttgtatcactgaataatattcccttgtatagaggtactacggtttgtttatccattcacttactgaggaatgtcttggttgtttccagttttgtcaattatgaaaaaagctcctactaacattcacgtatcggttctcgtgtggacataagttttcatatcacttgggtaaatgcctaggagcatgattgttagatcatatggtaagactatgcttagctttgtaagaactgccaagtgatgttccacagaggacttataattttgcattcccaccagcaatgagtgaaagttcctgtgttccacatcctcaccagcatttggtggtgttgctgtttaggattttagccattctaataggcgtgtagtggcatctcatggttgttttaatctgcagctccctaatgacatatgatgttagcatcttttcacatgcttatttgctatttgtatatcttctttggtgaggtgtctgttcagatcttttgcccatttaaacaattgaattttctttttattaaattttaagccttgtatattttggataacagtctttaccagacatgtgttttgcaaagattttctcctagtctgtggcttgtcttttcattgtcttaacaggatttttcacagaacagaattgaaaaaatataatgaagttcaacttgtcagttttttctttcattaattatgcctttggtgttgtatctaaaaagtcatcagcaaacccaaggtcacttagattttctcctatgttatcttctagatagatgttttatagttttgaattttacgtttatgtccacgatccattttgagttaatttttgtaaaaggtgtaagatctgtgtctggattcatttattcgtatgtggttgtccagttgttctagggccatttatttaaaagactatcctttttttccattgaattgtctttgctcctgtgttatcagtggactatatttgagtgagtatatttctgagccctttattagattccattgatttatttgtgtattcttctgccaattccacagtcttgatggctgtagctttgtagtatatctttaagcctgtagtgtcaatcctctgactttgttctttaagattgtgttagctatttggggtctttcgcctttccacagaaacttcagaatcagtttgtcaacatgtacaaaataatttgctggaattttgattgggattgtgctaaatctacagatcacgctgggaagaactgtcattttgacattattgagtcttctgatccacaaacatgaaatatctctccatttatttagatttattttatcagaattttatcattttccttatatacattttgtacatattttgttagatttatacataactctttctctctctctttttgatgctaatgtaaatggtattgtgttttaaatttcaaattcccattgttaactgctggtatatacgaaagcaattgacttaaaattttattttattttatttcaaattttaatctgtttatttattttgagacaagttatgttactggctaatttttgtatttttttgtagagacagggttttcgccgtgttgcccaggctggtctcaaactcctgagctcaagtgatccgcccaccgtggcctcccaaaattctgggattacaggcatgagccaccatgcctggccacaactgactttggtatatcagtctaccttttaaatcccctctttgcctttttctttcattgatttcttctgtctcttgaaagagaaaatactcagggtttggaaaaaaatatgaaattaaatattttaaaaattagactttatttttaagtttatagaaaatcgagccgacagtatggagaatccctatgtgccccccaacagtttcctctactgttaatatcttccattagtgtgatacatttgttgcaaatttaaaatttaagtttaatgcagtaagtaggtattgagtacttttaggcatgaacaagaaatgttccctacccccatgaagttcacaattccactgagaaggcaggaaaaaaatgctgtcatatgagccattaatacaaaataatgcacaatttggttttaaggtgtgtcctcctgagcaaagaggaaggctctggaagtgaggtaggaatgggataagtgcaggtagattacaggcaaagtccaagcagaaggaaaggcctgtgcaaggttacagaggcaggaatgttagagggaggggcttagcacatatcacattgggcagaggtgggaagtgactttgaagagcaaacaggacagggtccattgtattagggtgctttagagggacagaactaataggatagatgtataaatgaagagggagtttattaggagagttgactcacacgatcacaatagacagcctgtaagctaaggagcaaggaagccagtccaagtcccaaaacctcaaaagtagggaagccgcccaagtgcagtggttcacacctgtaattccagcacttcgggaggcagaggcaggcggatcacctgaagtaggagtttgagaccagcatggccaacatggtgaaaccctgtctctactaaaaatacaaaaattagccaggcgtggtggtgcatgcctgtaatcccagctacctgggaggctgaggcaagagaatcacttgaaaccaggaggcagaggttgcagtgagccgagattgtgccactgcactccagcctgggcaacaggctttttttttttcccccccccaaaacaaaaaaaaaaagaaaaaaaaaaaaagtagggaagccgatagtacaatcttcagtctgtagctgaaggcccaatagcccctggcaaatcactgctgtaagtccaacaatccaaaagctgaagaaaatggagtctaatgttcaagggcaggaagcatccagcatagggggaatgatggagcccagaaaacttagccagtctagcctttcaatgttcttctgcctgcttttatcctggccatgctggcaggtgattagatggtgcccacctggattgagggtgggtctgcctctcccagcccacggactcaaatgttaatcctttgacaacaccctcaccgacacacccaggagcaatactttgcatcctttaatccaatcaagttgacactcagtattaaccatcacagtccttcatgctgctgtgaggaatcaaaacttgataaagggcttagagttgagtttctgagcagatctttaggatctggttttcccaggaccattggtttttggcttcacatatatctcaagccagatactctgcaccgtttgcttctttgaatcaaaattaaaggctcatgccaaggagaagcactgcttctgggggagagctaccaaatgggaccacggctttttcatttgccacaagggtagaattttgtgtgtgcacataggaggaaagcaaacagcttaggaggtcataaatagcaatatggaccctacagggaaattgccctgagttctccaggcccctttcctgggttgaactcactctccttgaaggcctttgtcatttctggtggtcaggaaaaccctgtggggtctctaagaagggaggaaagcaatgagggaactgaatgaaccctattgctttaatctcttctcactactaggggaagagcaaggagggcataaaataccctatttttctttcttggtcttagttaacttatctcaacaggcgtctctagatttacatggaattgcttattcaggtcatcaatgagactgcagggacacgagaaagttttgttagtgaaaggacatatacacaactttggtcacacctgccccacgaacatcacctgccttcacaatctctctaggtatccgccccttctctgttgtttctttgcccccactcctactgttgccacctgagttcaggttgcccacttgactgcaagagcacaagggcagccaccaactccctggctctcgtccctctcacagtcactgcgttcaaaacatcagaggcagcttagagccattcttttcccatacaaggtgtctcatcccttctctgaagcaccgcatcacttccttttcttttcttttttttttttgagacagagtctcactctgtcacccaggctggactgcagtggtgccatctcggctcactgcaatctccgcctcccaggttcaagtgattctcctgccttagcctcctgagtagctgggattaccggtgcccaccaccacgcccagctaatttttatatttttagtagagacagggtttcgccatgttggccaggctggtcacgaactcaagtgatctgcccacctcggcctcccaaagtgctgggattacaggtgtgagccactgcgcccagtacaccacttcctttcggttcccaccctgccccaggacctcagcaccctccctaaaactcccccatatattctgcatcaagtctggactcttgggcctggatttcaagatgttccctctcaaaacctaccagcctgtcccgtgccttagtccactgctgctcattttacccctgggcctggcattttttcctccttctccctccaaagaacaatttaagttctaccttctctatacagggttgccactttgagcatataaaatatcagatagttggttaaattctaatttcagatagataaaaaatgtttaaaaatatgggacatatactaaaaattacttattatttatataaaatttaaacttaattagacaacctatattttacctgtcaaccttatgtctacaaagcctgttcttaatgacccaattttctctgatctcctttttttagtttctaaaacacccaatttagtctttaattcagtatttcattctatgctattttatacttattaattatatatataattttaacacttattgagtaattattcaacatcagggagtgtgctaaattcttttcataccataacttacattcttataagattcgtgataaagtaggtactgctacaatacccatttcataaatgagggagctgagtttttgagaggttattttatttatttaaggttccaaagctaattaagaacttgaatgttgatctgtctgtagggtgaccaacttgtttcaattttcgtggcactgctctgttttttttttgtttttgttcctggttttgtttattttttgagatggagttttgctcctgtcacccaggctggagtgcaatggcatgatctcagctcattgcagcctccgcctcctgggttcaagctattctcctgcgtcagactccagagtagctgagattacaggtgcccgccaccatgcccagttaattttttttttatttttagtagacacagggtttcactatgttggccaggctggtctcaaactcctgatccacctgcctcggcctcccaaagtgctgggattacaggtgtgagccaccacaccccgccagcactgctctgtttttaaactgaggcccgcatcccaggaactccctcagtcctgggcaagccctaaacatctgacttcaacattgagattctatcttacttctcatttttcatgggttttaattgtgttctctcagctagactatggactccctaaggaaagggacacgtcttatggtatttactcatactaagaattacttagtaagtgcttgacaagtcaggagtaggaagatccttcacagaccaaatctcttttctagggtctctttgtttttgtttgtttgttttgagacagggtctctgtcacccaggctggagtgcagtgatgagatcttgtcttacagcaacctccacctcctgggctcaagtgatcctccagcctcaacctcctgagtagctgggactacagacacatgccaccacgcccagctaattttattttattttttgtattttctatagcgacagggttttgctatgtggcccaggctggtctcgaactcctgtgcttaagtgatccacctgcctcggcctcccaaagtgctgggattacaggcgtgagccaccacgcccagcctctggggtctctttggattgtaggagctgaggactgtgtggagctcatgcttgggagtggccagtctcagattcagctgagacctgagtatgacgaagcctttgcaatagaggcacacatgttttcatgatgccactggattctgcttgcaaagatgccaggcgattgctatcagcaacaatgcctctaaattgctgaaaatgcagctccctggtaggtaggtcacttgacaagctgagccttgagaggcatcctgctgtgaagtctgagttagggtatgggtgaggctggagaaacagaagtcagggtgctaggacgagcggggtgcaagtgggcggcaagccagtcagcaccttgctggatgggacagcaccgtaggaagctgtgtggctgttgtttttttgctgggactctgcttttgtccaatgggcacatatccaaaagattatatattattacattattacataataaccaagtggttaaaatgatgatttgtgggtgttattgctaggctgcaatgtgtttaatgaggtgtgataggaaaggcagaaaagacagatttccatccctcaagggtgtgtggctaacttgtctcaacttcattttaaatgccggttggtgttgagcacacattaaatataagaactaagctgtatgtggagaagtcatctgtaaacaatcatttgctattttaaagaaatctaagttgaattggtaaaagaatctcaaggtaactgtcttttctgttgctccatcttacttcaaagtgcttgaagttttttatatgcctttaatgttcaggttttttctttaagagaatgtaagagacatggggcacaaaggttaggcaggagtttccattttgaaccgtgctgacagactcctcagtctttctctctttagaaacccatgctgggttttccctgtctccagagggcagcctctccatctcagtgtaacattcaaggccattcctggcctagtctggctccagcctgactttgcagctcatctcctaccagcgtcttaccatgggtctgctccagctagactgctagggactaaatgtttgtgtacccccaaatcatgttgaaacctagtccccattgtgaggggtttttggaggtgaggcctttggaattaactgtttttataaaagagacctcagagagctcctttttccttcccccatgtgaggctacactgaaaaatggctgtctgtgaaccaggcagagggcccctgccagccactgcatctgccagtgccttgatcttgggcttcctagagtctagaaccatgataaataaatctctgttgtttataagccactttgtctatggcattccatgacagcagcctgaaaggactgacacaggctcttcgattaccatcatctaaatacacactgaacttttctgcctcttaagacttttctcttgcaaggtatcatggtttagcatttaatcttttttttttttttgagacagcatttaatctttggatctagactgcataggctgaaatcttggttcttctatttactatgtgatcttggataagttacttaactgctctatgacctgatttctccaactggaaaaaaattaaaatgatacttatcttatagaagtcaaataatggaagtacttagaacaatgcacatcgcatagtttaagtactcagtaaatgctagctccttatttccataactagatctcattacccttctcacgtagctcaaaatatgtctttcccttgaagactttcctgaccaccccatcctgcaatgtacttccatcttgagaaatcccgagttctggcactgttctttggtgggtgggtggtttctgttctcatgcttgtgtcttatgatcacagctattcattgagcactcactttgagtcaggcttgtatgacacttggaggcacgtattctttatctcactttatagaggaaccaactgaggctcagggaggttaagtgacttgctagggttgcagagagaggtgattctggggttccaattcaggttccccacacttgcaaccatgacactctctattttactaggaaacaaggagtgaatcttgcacttgattccagcttccatactgcttttcaagtagaaggcactcaacatattgctgatgatttgatgggtcagtatgcaaactgttgtccttgtaagtgccacccagtgccttctggttgtgatgatcttgatgataaagatattgcatgatatattttgatgggccttaaaaaattagacaatagcttattcttcttgtgttgaactctacgtgaattaaaaaacaattctcacttattttttaccttaactatcccctgctgtttcaaatatggttaggtggggaatgtcaggaacaatcttattatgaatgctgcttttgtcacaaaggagactttctcatgactcagtaccagctaattagtctgtcagtggctttctttggcgaggagagtcatttgatccattgttgacaaggtgcaagctgctttctacctactctgtggcagctccaatgggtctgacattttctcaacccctaatcaagatgttattaagcttctgatggtttacagccaactgggatgagagtggattggttttgtaaacaactgccagaaagacaactcagtggtactttagcaatatgtaaacgcctcagattttcctgtgtgtgtgtgtgcatgtgatacaaaggcagcttctgtgatttctaaattcctggaacatgatagtttttttttttttttttttttttttttttttgagatggagtctcactctgtcgcccaggctggagtgcagtggtgcgatattggctcactgcaagctccgcctcccgggttcatgccattctcctgcctcagcctcccaagtagctgggactacaggtgcctgctaccatgcccggctaatttttttgtatttttttagtagagacagggtttcaccatgttggtcaggctggtctgaagctcctgacgttgtgatccacctgcctcaacctcccaaagttctgggattataggcatgagccaccacgcctggctgagactgaaattgttttttagagatggggtctcactatgctgcccaggctggagtgcagtggctattcacaggcacagtcacagctcactgcatcctctatctcctgggctcaagcgagcctcctgcctcagcctcccaagtagctgagactacaagcacatgctgctgcacctgactctgagactgaaatcttcaaaaaccctggcccatttaatcaacacacatttattgaattagtactatgtgccagatactattctaggtacttaggatatagcagtgttagaaatagactacaattcctgccctcttggagtttcttttttttttttaaagctttctattatggaaaacatttcaaattcctataaaagaagaaagaataatatacagtagttccccacctctttatccacaggggatatgttctaagattcccagtggatgcctgaatcaaatcctatatgtactatgtattttcctaaacttgcatacctatgataaagtttaatttgtaaattaggcacagtaagagattaataataacaactaatgatgaaatataacaattataccagcatcactacttttgtgctttgtggccatcattaagcgaaacaggggttacttgaacacaagcactggatggcctgacagtcgatctgatcaccgggctggctactaagtgactaatggataaggagcatgtacagtgtggaggccctggacaaagggatgattcagatcccaggcgggacggggcaggatggcgtgagatttcatcatgctactcagaatggtgtgcaatttaaaacttatgaattgtttacttctggaattttccacttaatattttcagactgtggtggatggcagctaactaaaaccacagaaagtgaaactgccgataagagaagactaccgtacccaccattcagctttaataattatcaatattttattctttttacatctatccctccaccacacacttatttttaagggagcacattaaagcaaatcccagacctcaaacatttttcatacgtacttcagtatggatgtctaacagacaagaatttttaatagaaacatgaccatcatgtcatgatcatcatacctcccaaaattaacactattgaaaatataatttaatatccagtctaggctaaatttcccccatttgtctaaggaatattttcacatttgtttgtctgaatccagatccaaataaagtctggacattgcaggctgtggatggagctcttatgtctctcctggtctataaccattcccctcagccattttttggttgtcagaattgggttatttgttctgtagaaattcccacattttggcgttggatgattgcatcctcatggtgttttttaaaaaatgatttttattatgccttacattttctataaaataatagttatttctagaggcttggtcagagtccgtttcagtggcaagtgctggggagattgttggactgacatcctcatggaaactggcttgtgttatttttgtgtgccaaagatgcttctggaggcgtcttattggccaaaaatttggggggtggctggtacccgaaacttagcttttgtgccacagtggcaattttcatcctaatgccatgtgacattccttttgttccgtcttcctttatgtaggctttaagaagacttcaattttttttaaaaaataaaaatacatcataattgcatatattcatgaggtacacagtgatgttgcaacacatataatgtatagtgatcagatcacagtcattagcacatccatcatctcaaacatttgtttctttgtgttgagaacattcaatatcctccttgtagctatttgaaaccatataatatattattgttaactatagttatcctacagagttatagagcactagaacatatgcctccaatctagctgtaattataaagaagactttgcatcatgtggtgtctgagagtggcagcaactggagggtctggggagcagtgccccatgtaggaacatgcaaattcctttgttagtgtcttctcaggaactagggctaagaaaagggaaaataaatttatagaatagggccggcatgacagctcatgcctgtaatccagcagtttgggaggctgaggtgggtggatcagttgaggtcaatagttcaagaccagcctggccgtcatagcgaaaccccgtctctactaaaaatacaaaaattagccagccatggtggtgtgcatcagtaatcccagctactcggtaggctgaggcaggagaatcgcttgaaccgaggaggtggaggttgcagtgagctgagattgcgccactgcattccagcctgggtgacagaacaagattctgtctcaaaaaaataaaaaaagaataaacatagaatagcatgaaactaaactagatcaactgaatggaaatatctgaggaggtctttaagggtttattttgcaaaagatatccaggtgattctaatgcacaaccaggaatgagaagccccattcagataataagtctcgtgcggctcaatggagtcctcttcagtttgtggtctacttcagcaggcagtccccacctgcaaccttgacaaaggagatggattagaggagggcaagcccaggtagaagcagtaggaggttcctggggtctccagtggctactgatttgtaaggatttctatggtatgtgaatttacttaataaatgatatcataaactttttgaagaatgaagacagggagtttggtttggagaatccaaaaatatgataggaagaaaggatgactccagtgagcaaaaagaagaatagagttgccatttactgacatagggaaggttatggggaagggttccattttgaacatgttctatttgtgatatgtaatgtatgctgtagaatggatgttgagtaggcagttggatatacatctgaggttcagggctggagatagaaatttggaaatcaggaaaacagagatgatatttgtttatttattattattatttgagatggagtctcactctgtcccctaggctggagtgcagtggcatgctctcagctcactgcaacctccacctcccaggttccagcaattctcctgcctcagcctcccaagaagctgagatcacaggtgcacgccaccatgcctggctaatttttgtatttttagcagagaccaggttttaccatgttggccaggttggtcttgaacccctggcctcaagtgatccttcctcggccactgaaagtgctgggattacaggtgtgagccaccacgcctggtcaatatttaaagccatagactgaataaggtcacctagtgaatgagaaactgacttcctggaaactgcatgaacaaggtgcttatagaaccactgtaagggtttctctgaggcatatccaggagggtgactgctgagtcataaagcatactgctaatttttttcactaagcactgccaggttgatctgcagaatatatttaccagtttaaatttccatcagcagtgcatctttccccagatctttgccaatatttgggattatctttctgatttctgccatgctggtgggtgaagcagtggtgtgttgaaaacagttcatgagagctgataaagcacatttcttcccaacttcttgttcagtgacctcaagctacactggtagctggaaactggcagtgctcagagtatttgcaccatggaaattggcaaacactgtacgttaggacttttccttccctggggagcgggttttaaaacatagaccagcatattggtggctatggggtcacactctttatattcccactctgattacaagtggggttgagcatctctttaatgcttgcttgccattctggcttttccttctgtgaattgtctattcttatacttttctcatttttatattggcctttaaaatattttatattgacttccttttgatttgtgaaaagttcctcatgcatttcagatattaatccctagttgcttttgaacatagcacatgttttcttccaatttgtcagccatctgttaattttttctatggtattcttaactgaacagaacccttaattgtgatgcagtcaagtcatacaatttttttttgcttcaaggattgtgcttttgcaaacctgttttatgaagtaaattcctaacccacattatagagatagtctcctgcattttcttttgtatcatatgtaggtctgccatttatctggagttcacctttgtatatggcagaacatggggctctcaactttatttttccttgataaattaaagccagtttcccgaatgccgtcttctaaataatttatatttttctcattgatctgtggtaccacctttgtgtaaatggaggtagcatttatacgtgggtctgctcctgagttcttcattctgtttcctatttgctctatgtgttcctataccagtaccataatatttttattactatgtggcaatgacataatatctggcatggcaggtctgctctggtttttataattgacttaactgtttaaaatttatttctccttatatattttgtaagtttgttgagttccctaaaaatttagtttctgctggaattttggttgccataacatttactttggagactaaatggatacttttacaatgtaaagtcatcctatccatgctgtatctctccacttattcaatattttatgtccttaaatagagttttaaaattttctccttaaagtttttgcaagttgttgggttaattcctggatattatgctttagagtttgttaaactttattgttattgtgaatggtttcttattgtctgttacatttcccagttgcttactgctgatgtagacaaaactattgatttttagaaactgatcttgtacttggcaaccttgctgagctaacattacttctaatactttgttgattctgttgggctttttatgctgatgatcacacctgtaaacatcacagacaggaagatattaggggctctgcccagtgctctgatcttttgcatttaagcacttctgctagttgaactccaatctggtgccccaattctgacagttgggtgtctctcatggtcctaagggcctaggccccctatacactcacaaattagaaactgatgatattccatcccatatccagtccatgtaaaagcagtgaccttgtcttcttttgctatttcctctaacccttttatcatggtcggggtcctgagagctgctgacagatcttcctgctgccgagtgtctgaattcctgaatgctgctctatgcagccattctgggtctttaatgcccccaaagacagcctgtgtaggttagcaaagtagtgaatcaacataggccttcagatcagacagacttaggtttgaatcttatttctgcccctggctacatggagcaagtcacgcagcctcccagagtctgcttcttcatttgtaaagtgaagacaagatttccataggtcaagtgccttacagtggtcagtgagtaatgccctttctccacactgtgatgttgaccagtaagttgatcacctcctgacgctgtggattattgctatacttttcaggaactttgtgtctccagatagaattgaatctcagcagctacagttggtccacatccccatgtgccttcccaccccaatgaatagttcaagttccaagttctggccacatatcattgtccagtctcactctggttaactgggcaatacctggttctaaagcttgtatgtcacgaggtattctaggaagcatgactccaacgagcacttgcattcttgatgatggtataaagaagtaacgtcagatttttgaacaaaggcaactaagtgagtgggagactctggtggcttggtatcctgggaatttgcctatgtatcatacagtgtttgggtgtagcagataaagccagtggcctggctggttctaacagagatctttattataactaagaacaactgagctagccatgccttgtcacctactaatagtggtatttcagatggataatttaaatcagcaataaaagtgaactgtatacgtttggaaacttcaccaatagctactctgttacacacagatctttatgactttctgtggttcaatgacaattggcctcatttataggtgcttgaagccaaccaagggcagattgccttccttcttttaaccagctaaagagatgggtgggtcagacaagaagagggtatgatgaaagcagggaaagggaggtggactcttcagagggaggaggaagtatccgtgtcacattatctctgagagcactcgcagatgctgagcctgcagagacagagaaactggcagctgaccagggtcagggatggtcatgtattcaaatattgtgggttttagtcaagtgtgctccacccgattcaacaatgtgatgtgactgctcctagcaactattttgatatggtgaatgttgttaagcataggacctaagaagaggtggcagtctctttcctctccgcacttggcaggccacccactcattcctgataatcacatttaagagagctctggacaagctggaatgcatccaagagaatccctcaacatgctggtgagtgggattgtgaccaggtcatatcaggagtagcctaagggacaggtaatgtgtgtcttggatgaattggagtcagacttaagagtccccagggcagaaacaaaatccagtgagggagagatgcagggagctggattttagctcctaaggtagaaaatttccaaaaggctgatcaaagattaaatggctgccttaaaaggtaatgagttccttgttagtggaggtgttcaaccactgcttggtgggaagacactgtaaggaggattcaggcaagtgggaagggggctttttccagtccctgaaatcaatgattctaacaggaaaagatgctccggggtgcggtgagcgcttacctctgctcttgcagagacactgacagacgttcattcaacatctgttcctgccaggcactgtgcgcgctgaacacagaagtacagcctctatgaagcagccgctgtaggcctcagagacagctgatagatgtaacactgttgtctccatgtttcaaacttcggtcatggtcttactaggtctcctcattaaggggactcactatgtgtccagtaacgctttcttgttaccagatgacagagagtcaggctgtcagagttcacgactttaggtgcacagtttcaccctgtctggtccttgggagacggagaaggggtcaggagaaaacgtgggtgaagaggcagcaaagccgcaggagatatgaactaattgctcaacgtgggtgtagcacggattaggccttttacagcaagcgctgccagcagggaactggtggatgtactcttgaccacgctcggctggactctggggagcccaagacgggtaagactaggtccccggccccagcagctggtgggggcgccgcaggttagagacgtgaggccgcgaggctgagggctgtgaaggcggtgggcacgcacggcgtgccggggccgcctggcttcgcggcgggggaggtaacactgcgacaccccgcagacgctgtcagccggggtcgcggccccgcgtgcgcccgatcatctgactgctggggagtgcgggggcgcgggagccaggcgagccagcgcaggcgcgcgctgcctcctccgtccccaccgagtccccagcgcgtgcgcggggccgtggccgaggcctgcgcgccgcccggccgcctgcactgcgcgcgcgcccaccccgcgtgggaggcagcgggaggggcccggagaggtgtggagcggcgcggcgggaggctccgtgggcggccacgggagacagcgccggcgggagcgcgcctctcggcctttcctccgcgcccccgcgtccccagccggccgctccgagaggacccggaggaggcaggtgggccgggggcgcgcggggcccccccgggccgcgggctggccggcggcggggttggggccggggtgggcggccctgggggcccgcggggaggtcagtggccccgggagggtcgcgcagaggcgctgggggctgtggaagccccgcggccgcctcccgtgggcaccggtgtcgctggccgcggggaggccttctcggggcggagcggcccacccggcggggatggggactcctcgtggcggccgctgacggacggcccaactttaggttgaggggcgcggggtgtgcgggacccggcggcggagctgggctctgggccacgaccgccagccgcggctgccccgagagtccccgcacgcgcagtggctttccaacgcggcctcttcccatttctcacttgactccccttgcgcattaaattgtcgagaaacctttggccagtgggtcttcaaagctaaaccaaatggctgtccttgcagtccttggctacctgagatcccttaattctgaaccatccgcacctgggaggggaagttgaaaggagcgctggagctgagcccgcatccttaaggatcccattcactgcttatgatggtagagctttgaattagatgtcaggctgttcacgtcatccagactctggttttcagctctgtgctgagacagtgttttgatacgtatcagaggatgatgttcctatgggacaataacttgctgtatgttctgagatactagactgcgttcatattgtagcaccatcatcgtataaaacgggcgcctttgaaaggtttcagtaaacaccttcctcaggaacatccgccagcacttaaattgtacttcactttcactttgacgtttgttgtttgtgaatcttgtgcacaatttaaagtgagtcgtctaaacagcacaggatcacgtggtgcggggcattgagcaactggggaggaaagcagagacttgaacctgctggagtctagttggtctgcgtttttatgttggagaaccatcctggttccagcttattttgctttcgtaaatatgatgcattttttaaatgctttcatttgatacggtctatctggactgtaagattgagtctagccatgcatggaatgtgtttacttctgttttgtagaagatttagcccatggtattctatttgtaggattcatttcagacattttgtgtttaccacatacagtcccaccagcaagggcttttaaaaaagtgacctatgttgtctctcatagcttatgacaactccaattttgacacgtgtttgaaactagtgatctttagattatataaaatcaacttcactctttctccctgttcaaacctcaaactctggttacttttaggcttactgctcccttgttaattatttataatgaactatggagctataggcttgctttagtgtgttaacctttatttgtgtcttgtttcaggcatttgtatattgttttctcatctggagagtgagctgcactgttttccttcagtgctgtttagaagagctttcggagaccagaaacatgttctttttgcattacccaatatggtagcactagccacatatagcttttgaccacttgaatggggctagagcagtggaagcactgaaattttaatattttttttcttttccttttctctctctcttttttttgtttttgttttttttttttgagacggagtctcgctctgctctgtcacccaggctgcagtgcagtggcctgatctctcctcactgcaatctctgcctcccaggttcaagcgattgttctgcctgagcctctcgagcagctgggattacaggcgcctgctaccacaccctgttaatttttgctgtggggtttcaccatattggccagggtggtctcgaactcctgacctgaagtgatctgcccatctcggcctcccgaagtgttgggattacaggcatgagccactgcacctggccaatttttaaattaatttaaatagtcacatgtggctagtagttagctggtcagatgccacagctttaacttattagtctccaggaagccttcgttgaccctcttgaatctgtgctttcataggactcagctgtccttggtcatagcacttactactttcaactttctggtaggaatcaacactaggctgtaatttatatgagggcaaggacagatctggtttctttacctttgcatagcttagaacttagtaagaaaaactgaataaatatttgttaaatgcataaatagctttttcagggcaggtatttcaatttttaattctctctaaggccaactaagtgttcagtactgtaaatacctgtttagtagattgtacagatgttatgtaggtagcaaataaaaggatcattggagttatgctttaaatacttacgtggtgagattggaatctcaggagaatgatgactcataacaaagtattacaggaaattgaatgaaagggcctcatgattccagctaatgtagacacagctttggtctcctattagttgaataactcaaggacactcttgaaccatatctcaaatctgaagtctcctggcttcagtaaggcccttttatggggtccagacagtcctgaaccagcctgaagatgctagtggacatccccatttattactgctctgtgttaaagcatggaccaaggagtcttggaaaaaaaatcacaaggtatttgagccacgttatgtaagatgcttttgctaacagctaacttggagtgatgagtagggtgaaattcctatagaaatcagagtttggggaatttgattctagctattgttagtatcagaggcacctgttctgtagacagttgattagtgccaattttttttttttttttttgagatggagtttcgctcttcttgcccaggctggactgcagtggcgggatctcggcttaccgcaatctctgcctcccaggttcaagcgattcttctgcctcagcctcctgagtagctgggattacaggtgccctccaccatgcccagcgaattttttgtatttttagtagagatggggttttgccatgttggtcaggctggtctcgaatgcctgaccttgggtgatccacctgccatggcctccgaaagtgctgggattacaggtgtgagccaccatgcctggcagggccaatatatatatatatatttttaacctgaggcttactttataatcagttatcaccagttaaccatagttggatttggaatgaaagtgtgtactcagttcagatcagtatacttagacatttgaccaagagtccaggtgttgtaggtcttcagatccaggaattgcttttaggaaatgaatctgagactataaggaagtttataggggtacatagtttcctttgggaggacaaaaggtagaatgttaagtttttcacgaaaataaggaaatgtaactagagaaaaacgcaacaaagacaaaatacaaagaatgttcactgcattggtcaggtaatattgtagcttcttctggacttgaagtatctaatatgtaaaagaatgaagctggttacatctgattgcatgaatcctctttccactttgaatctaagctttgaatattagttaaatatgtgtaacacactattctagctcctgtggtgactgctagttgtgtacgatagagttcgtatctttgaggatctcaacagtttacaaggaaatgaaaggtgctctggggatcacttaaaatttttttttttgaatgggagactccaccctttgaaagggaagtcatgtggtgactcctcttaaccgactcagacagatatccactgaatctttttgctgaagaattaagagtataaaaacatgtctgagtcccaaaccgtgattatagtcagattaattttcctaaaacagctttaatcatgttactctctttaaaaaaatcagtagtttcccagtgctcatgaaagtaagtggtttggtctttgatgaggtatttgctcctcagtacagccctaaaaagcccttacagcctcacctctgactgttttcctagtcatatcccaagttccagcctactgttcttttaatgggatccccttttatattgatacctattcatcattcaagactcatcacagatgataccttcttcaccatttatgattcttagaagctccaactgcaaatgttcctggtacttatgtgatggagcagatcccattctgcctcataatctatagttattagtggtattttattcaccttaatagattgtaaactacctaagaagcatggaccatctgttaactcatttttgtatttgctgaaacatctagaatagtgtcttgtatatagtggttccttaataaatactcattactgtttggaattgatagtatttgaggaagatcaccgctgctctataacactaattccatgaacttgtcattttcctatttatgtggcaaggttaatgtcaaaatgcttctaagtatttggtggtaagtaattttagcatccaagaaaatgtgaataccttaaaatagtaacaactggattaggttacctaatatataacatctatatccatataagcatacgatttttgaggaaaaagaaagcctcctactttttaccagttcctgccagtattaagaaaacatgaatcaagttaggaagacaacagtgagctcaatgaaatgactgttttattgtagtggggaactgatggtaaggataattgagttagatatagggttggttaagtagaacagagcacacattaagtagtagctagtatggtgttgtctactaccagatcaagccattgattacctatttttattctgtgctttctactgaaataatctaaactcatttttcatttagttttataatgttttgcttacattttaaaaacaggaattcatgatacttcagatagtaaagatcggatacaaaagaaactggaaggcttttagcttcataagtttggttttactagcagtttctctgctttctacatcatttctgagatgtaggctagggtgtagtacaaagtctaatttagagcaaatttattctaagcactcatgttttctgggaaaaagaggtaatataagccatgtgctttaaaaggcatggcttccatctttggccaggatagaactcacatacctcggaccttgttaagttgaacaatcttagtaaactcttagatttgtaagagggatatgattaattttcagtaaagttttctgggatagaaaataatggaaacattttaaggtagattatcttcatgtgatgagcacatggcatgagctattggatgacaaatgatgtaacttgtgccagtgttatgggaagttaaagatccatctacaagggttaatacgcccttgtttgttacatgagtaggaggatttcacccatttagattagctcagcatttaaagtgttttcacctattttatattccttttgagctttgtctagagagattacatgtgctaccgactggtataagaggtggtgtgaagcaatgtatgccttttaacaacagttttgccaaaaggaattttttccctttcataaaagatccttactgaaaatgtcagcagatttgacgtcaaataacttttaggcagttattgaaggcagtcattctaagttgcatacaaataaagtagaaacactttttttttctttcttattataggtggctttctagaagatgaccatagaggaccttccagattttccattagaaggaaatcctttgtttggaagatacccatttatattttctgcttctgataccccagttatcttttccatttctgcagcaccaatgccttcagactgtggtatgtgaagtagctgtgcttattttctgtgaactggtaacttgacttctctgttacgccttttttgcactcatagtctttcttagaaccatttttatggttttcataaaattgctaaagttttcctttttcaaaaatacaattgcttattgctttttctgcttcttaagctaaatgctttatttctgctgtcagcatttatattatgttaaaatgttcattttaagcatcatgatggatttagaggactttatttttagaaagcaatggtgcttagatatctagcattcttctgctattgatgtatttattttggttaaatatactgacttgctaaaaaagccatgtacttaggcaaagagggtaagagacccttccctggaatgtgaaatgagattggttaatgtttaaattggtccatttacatctcctctgtaaaatgttaatttagaagcattccacttctcatctatttaggcttatttctccagaaccataataaaagggaaccaggagataaatttgatagaattgttaaatttccagtttagagtttttcaagtaaaatgttggttcaccatttcaaattgtttttggaggtagagatcatacaatttttacatattagtagatattagtagatataaagttattggactgagaatttgtctttttagtcatattcgttgtagtatagtaattcctcatctccaagtttctttttttttttttttgtattcagattctttagcagcttacctagaccagtcgtcagaagtattatataaaacctgtgccttgatcttgggagttatctgcaggttttgcagtaatcaactgggcttattttcagatataacaaaatcagttatgcaggggaaaccttgaaccttgtgcattgtaccttaggtatgatacttgtctcactccatcttgacttctaattgtcttattttctttcctatattgtagcgctttgggatggagaacaatcattttatttttgtttatctcaaaaaggctaatatagtcatttgttattagttgctcaatgattgttgaataaatacattgaatgaaaggtaataatggatattgacattttgcataactggaattaaacgttgaaaccccgtctctactaaaaatacaaaaattagccaggcatggtggtgtgcgcctatattgtcagctactcaggaggctgaggcaggagaatcacttgaaccaggaggcagaggttgcagtgagctgagatcgcatcactgcactccagcctgggccacagagtgagactttgtctccaaaaaaaaaaaaaaaaaaaaaaaagcattgtagtcttagaattataggtttttgtagactcttatgaacctttccccactcacctccctgtgtagacatcatattttcaggatctctgtcagataaccatttaacctcttgcatgtcttcaatagtgggaaactaacaaaatagttaattttattgttaaaaagctttagttgtaataaaattgttttcgtatgttgactcaaaattggtctccctgaaattttggccaagtgattctagtttgatacatggcacaaattcctttataggatagcctttaagtatctgcagatagtttgaacattttaacttagcctgaaactccttaggctacacatttctgtttccttcaccagtttctcattgtcaggatttctagacccttttcatcgtagctgctttcttggtacactgtggtcagtctccccttgaaaagcggcatatataattgcatttattgagcaagtatttattgagggcctcttgtgtgctagggactgtcctggatgctggagatatcagtgaccaagacaggtcttctatagggaagaccagtaaacaaacaaatgaatagacaaagcaaaaataggtcataatgaattctgtggaagaaagaaacagggtgctgtgatagagaacaatgggggcaaggcagctgctttagatggggtggtcattcggagaatcagaagaggctggctgtgagaagagcctgggaagaagtgttccaggaaggaaaacagaaaactaaaggcacagtgttgagggaagaccttggtatatcctaagaattaatggaaggtctttgtggctgagaagcaaagtgattgatggcagagtgggaggagaaggaattggagagtaagacaccggccaggtcatgcggggtcatgtaggcccccatagggaatttttatataataccaactaatgagtgtaaaacaaagaaacaaaaagaaaccagtccacagaaaccagagttgaggcatgtgactcagtgttgactctcaaggtgattaccctgtgaaactatgtactgttcttgcataacaatttttggaatcttttgctttgaaatgccttcagaatcagttcatgcagaatacacattatatacattataaataccaaaataccttattatatattttgcttaaacattgaattatctgttaaatttaaataatataaaaaaatctcatttacccatgtagttaccatttctagtgctcttcattcctttgtgagtgtaggtccagatttccatctgataccatttccttccgcctgaagcacttcctgtaatgtttcttatggtgctggtctgccagtgatgaattctttcagctgttttatgtctgaaaacatctttatttaccttatttttttgaaaaatgtgtttgctgggtttagaattataggttggtagttttctttcagtacttgaaagatcttgctctgctctcttcccatttgcattgtttctgctgtcatttttgtttctctagatgtaatgtcttttttttggctgctttaaagagtttttattttgagcaattttactattatgtgcttaggtattgttttctgtatgttcttgtgcttgggtttggttgagctgcttggatctgagtttcagttttcattaagtttgggaaatcatttaaaaaaattttttgtctgcttctccccgttttcagatactgtaattgcatgtatattatagactgcttgaagttgtcccataactcactgatttattttatatttaaacatttttttctctttattttggatagtttatattactgcatcttcaagttcattaatctttccttctgcagtgtctaattaattagctgctgattttttccagtgcagttttcatttcagatgaagttttcatctctaaagtttgctttggctcttttttatgcccaggtctcttctccacctttgaacatttggaatagagttatattgactgttttaatgtccttctctgttaattataatatccatgtcaactctaggtctattattcccctgattatgggtcatgttttcttctttctttgcttgcctgataatctttaattggctgccagacattgtgaattttaccttgttagatgctggatatttttgtattcctgtaagtattcttgaactttgttctgggatacagtttagttacttggaaatagttggaccctttgaggtcctacttttctgatttgttaggtgggtctggagccattcttggcctggggctaattgttccctactactgagaattccactccaggggccctgaaccccctggctacggactggtactggtccccctaccccggcccctggtgccagaaagattggggactgctgttctactcaatgctgtgtgaattatgaggattctttttcaatcttccttgtgagaataggcactaatccctgtagtccttatggatggttctttcccttacttcaagtatttcctcacaagcatatgatgaatagttgaggaggaccctgcacaggtctctgggtttctcttggagtgtgtgcatccatctctgctgtattctgccctgtgacctctggccgcctcaagttccccagactcttagctctgtctcctcgactcagtgagtccagactcttagctctgtctcttcaactcagcgagtccagactcttacttagctctgtctcctcaactcagcgagtttgctgggctttttcttggttccccctgccccacccctgaactatgctcctggagactccctcaaggcagttacctggggcatgtgtaggacttttctcatttgtattccattcctcagagatcactgtctttcattgtctaacatcccgtgtcttgaaaaccattgttcttccctctggtgttgtggttgtttcagatggaagggcgaatttggccctcattattccatcttgacttaaagtagacatcacctccattttctcccctcaccccactttcttttgattaaaagctattttttaggccgggcttggtagctcacacttgtaatcccagcactttgggaggctgaggcaggtggatcacctgaggttaggagttcaagaccagcctgaccaacatggtgaaaccctgtctctactaaaaatacaaaaattagccgtgtgtggtggcgtgcgcctgtggtcccagctacttgggaggctgaggcagaggagaattgcttgaaccagggaggcagaggttgcagtgagctgagatcactgagatcggccactgcacgccagcctgggcgagagagtgagactctgtccctacaaaaaataaaaaaataaaaactatttttcatttaatctcaaaagcttgcaacagcataaaaaatactttattttcctttatggaagttgaaaattcaaatgtagttagatatgttaatatattattgcattgtagcttagaggttatgttctcattctgggttattctggcattaatcctgactcaatcactttccagttgtgtgattttgggcaaattgtttatattatctatccctttgtttcttcttctataaaatgagaataacaatagtgcctacctcatatggtagttatgaggattaaataaattaatatacacaaagttcatagaacagtccctggcatctacaaggcacttaataagtctaacttattgttatttaaatgagccctctggaaggcagggcattaagaagatttccagatttgctcttggagcatcttgagatgctgaaatgaggatggcagtttctaccgatggactttcctggtttgcagtttgaatgtcttggttgatgtcatcagatgttttggtgaattctctaagtggcccccacagaaacaggcacaaaggttccttacatgagccatgatggcgatttgtctaaagtttacatcaaatcatccagtaggggttggggaaaaggacagttttaagaatttggaaataatagtttggagggttgtaaccagatattggaggaaactagaggaattcaggatccagtgcagtttataggtggacagtgcctcaaagacaataaacaggactagaatctgataatgggcgtacttagagttttctatggaaacacaatttttctctctacagttcccatttctaccaaagataatcacaggctaatttgttcgcaaaataagttttgtctcattaagctggcctgattatatatgtaagtgcagcaagaatagtgaatatgtacacattctcaagtatgccattccagtcagaggtttgataatatctaaggggctttattggttttgtaaagtcaatctgaattccttaaaactgtctggtaataaggaatctgaaattagactttaaaaagccttttcagtctaagaagccaagcagaggacttgcccaattgtgtcctgttacaggggaaacaaactttcattgaacttatgtaaatatttatattgccatgaaaataaagaatactcaataagtttctgaattttggaggggttggggtagggagaaaagaaaatgtgtttcatttttgtttacaaaagtattcttcaccaaattgctgtaagttgtaggtcttaagggaaaagagaaaaggcattctttaactctagaaaacaaacattaaagaacccgcaatatttcaaagacataaaaattataatcaccctcatcagttcattcagtcccctgtaattcttgttctgcttgattttgggttagcagcctcatgaatccattggttttccattagagtgctggaaattcttacccagtccaatgctgtgatcttaaagttaccagaaacctgcacttgtcagagtcttttctgtaaatcttccagcaattttgtatcacagatgcttgcaaaagctttcaggaaaatatcagagtaaaaaatcactgtctgtagatggcaaaagatttaaaatgtccatagttacagatttgatgacagttcattttaatgcaattgacaaggaaatttggttgtttattttataacatttgaagataataactggaattatgactgataaaattataccagaacatatccaatttctaggaatttcatacaatttctaaaacacttacattaataatatagtcatacaaaaataacataaggttaagcatcacctttgacaatgcttctcatgcagtgtaatagatcaaataagcctagttagtttcacatatcaaataagcctagttagtttcacatttatttgacaatgcttcccatgcaaagatgcttaattagtttaatgtctgtgttttttttttttttttttaaagaaatagaacaagattttctaggggccgttgaaaaatcccagagttagtctaaggtcagaaaagacttcattcagaatttgatttttgagacgtttataaaaagaatacccaaaagattcaagattcaaagcacttgattaaataggattacaggtatttagttatccatttaaccaaagtgacaaagatttcaaaggcaaatacagagaaagccatgtagttgttaaaaaaaacaaaaacaaaaaaaaacaaaaccccttgactttttgagagagaaacttaatcaaagacagcacgaagcacatgaaattatcttgacaaaatacagaatctttgctttctaggcagaccattcaaaagttaaagaaaaacctttcacaatctcccatcaagagcaggcccatactccaagaaagtttagtcgttttaacaggagctgaaatgctagttatgcattattttgatatgaatgataatagattcattcaattttagccagcttaatcacacaagattctctctccctcttctgaacttcctatagccattttggtttttttccttcattttctttttcagcaaaaaacatatcttcctacttcacattttttcttgactgtcacgctagcattctgtagattgagaaatctatgtaaatacaccataatttctagaagcacgtttccttatattataatttttcagtgtagcacaggacatgtttactaacacacccaggtatctttagtttctctgtccaaaagtagataagcttatgttcagcaattaatgtttcagtatttatcttatgtggacttacattgatttaattcacttgttttgaacaattatgcttggattacttacgaaaatttcatgagacattaaatagctaagcatcatcttgtttttcttgctgagaaattttgtaacttagagatagcagaggcttatttgtaattcacttgtctaacatgagcttatttgactagtagacctacatagaatcaaagttgtacgtctgccttatgtctaatgctgacaactctgaaggcatattggttttttaaactaaaccaacaatgtttttgtttattgaaaattacccaagtcacatgaacttgaaaagcatttggattagttcctatttttctgagagttttcaggaatacttaatttatataagcacttgtttttacttatgtctattgaacatacatagctataagatctctgtgtctgtttgtgtatacagacagacacagagatcttatagctttcatttccaaattttagccatgtgtcaattaaaataatacaaagcttattggtttataaaagaagctggatccaaattgtacctgtgagagatggaacaagtcaaggttacctgctcagatggctacagctttttagtgaagattttttttttatttgagtgctgtagggatgcttttagagaagctatttttgagtcattttgtgttcagcagcttctgcatacaaatcaaagaatgcattccattgtctccaaaaggcttaggatactcctccttcaagggcactcccaaaggcagactatcttacctaaattaaaggttctccgaagtggtcactgaaattgcaaattattctttgtaaagttcacctattttttcttgtgaactttgtaaagttcacaagattctgatccacagtgtttttggaccccatctttgcattagattctctgaaaggtcttaactattaaggattcttttttcagcagctgctctggaacacagggaatcatgtgtttcacccttcccccttttgaacagaataggttgacttcctgagaagtttcagcaaaggttgttcagcataattggagagttctacacagaaggaggagagctcagattcaaaagagacttactctagaactccatggctgggtgagagagcagccagtgctgcggccctgggtaccagcacctagttactggccttggggcttcacaggggtcttcttctgatcctgcttctgacatcaaaaactgtcaaaagaaaattcagggtgcttttcttaatataaatattaagttagtaaaaaactgcaaatagggagacttccaaatcaaaagtggtaagaagcttgtctcacgaaggttatagtaaggtttataaagcctagaaaaggaaattcatacagcttaattctcactggttagaatgagtgggttagtttagtcattactgatttgctgcaatgtgctgagtcatgctgaccaagaaatgaagttcaagcttcatgtgcagtttaagtaggtgttttggagaataggtccttacaggttttcctgagctgggggtgggactttggctcagaggccaaggtttgtcttggcttctattttgatttttgcctaacaggaccattttgttgtctaagcttacgaatgttatcacatttcagttcaatctttctgattctcttctgatggactgctgctctgcttgtatatgtgtctttagtttggtgcctctcatcttttagttatgctgactctagaagtaagaactatgtgtacatagtataattttggaaaatatataaatgcaaagaagaaagcaaaaacaaaaaaacctcaatgagtcccactacttatgcatgctgttacaatctgagctcagtggtgagttacctcagcaagtagaataatagaggaaagaagatagactttggagacagacctggttttctaccccagatttgccacttactagctgtgcgatgttgagctggtattatttagtctgagctttgctttcctcatgtgcaaaatgagaataatacctgccaggtaaggtgttggtgaggatttttaaagtatttagtaagtgctcagcaaatgttcataatattttccttatttagatacttctgatttttttttagcatctaaaatatttgtatcatttgaaccttggttttattgtttattattttcaatatatttatttgaaacttttagtaaatttaatttgcatctttttttatttcagaattttctttctttgatcctaatgatgcatcatgccaggaaattctttttgatcccaaaacttcagtttcagaattatttgccattttgagacagtgggttcctcaggtccaacaaaacattgacattattggaaatgaggtaaggaattcttacattttaagttttgcattgttaggattgttaatggtatagatttttttccccatctgaaaggaagatggtaataaaggagaaaccctttaaaagttctgatatttatttgtatttccaggattttcatggggcagtgagttaatactatatattcttctgattatttcttcatgctctgtacttctgacatttgtagactcctggcgggtgcagggaggggcatttttcatatttccttctttgtaaaattaattttgtaaacttttatgcatttcataaagggatttgattaccatcatgttctatttacacttttggttggtttggtaaatatataggcttgaatgtagtctttaagaatattagattttttgagggagggttccttgaccagtatgttgctgtgttgtaggaagagagtgcttatacttttttcaaatatcattacacgcatagaaataaaattttgctcatttttgagaggaacatatttggagtgccagattacctttggaataatctttaagaatttccttcagcctgctgacaagttcagttttcattattgttgttgagtacagatttaaaaatttacccttaagatatgctcatactgtctatacattttactgagaagtaattcagatacgatagactaacttggttcctcagcattggtttgaaagcaataggtacctcagtagttaggttgtaaccatattttccttgactgcttcagattcttaagagaggttgcaatgtgaatgatagagatggattgacagatatgactcttttacattatacctgcaaatctggagctcatggtattggtaagtgtgtggtaaatctatcagttgcttatgtcatctgcacttgtgcttagataatctatatttatgcccatatattgtctgggggaaggcacccagctgatgatgataatattgcctgaagagctgaggattcagttaggtccttccaaaaaccatattccctttaatcaaggaggtctttataccctcctgatacctcttaacttttctggatcaggcctcatgcctgattgcataatagatgagagtaactagtaacaccctaaaatctttctgagggtttataacaaggtttgacagtccaaggtcagtctttgcatactgatccctaatcttaagaccccagtcttgagacctaaggtctgttcctacatatgtaacatatgtgcatattttccaaaattgttattctcttgtgctttttgtcattgtatgaacctgcatctcttacttaactatatattgtgattgtctctccttgtttcaatagtctgatgtggtggtgctgaagctactggtggtgatggactcctttttcccctcacaactcatcatgaactgatactttcacaaaataaaataaaaatgaatttataatacaaaataaaataaagccataaaatataagcccaaatatttttcaaatggcataaaactggccaggcatgatgatttacacctgtaatcccaacactttgggaggcccaggcaggaggattgcttgaggccaggagtttgagaccagcctgggcaacacagtgagaccttgtctctacaaaaaattaaaaaattagccaaccatggtggtgcatgcctagagtttcagctgcttgcgaggccgaggtgggaggatcgtgtaagcccagtagttgagggttggcgtgagctgtgattgtatcactacactgcaatctgggtgacagagcaagactgtctttaaaaaagaggaaagaataaaaggcataagactacatttcagttaacataatgagaagacatattaaatagggaaaagcaataaaaggtacacacagattgcaatttgggactgccagtggtccacggaacacgtttgggggagcactgatctgctgtgttgttgttgatggcttcatagcattctatgtgtgtctcaatttatttaaccaatttcttattatactttttggattttttagaattatattaacaataagagtgcagtgatgagcatctttgcagccaagtgtttatctgtatccctgagtatgattattttcttaggatcaattcttgcaagtgaaatttttgaagtgtgtctatacagtgcactgtttgctttggctttttaaatgaggcaattggtagccatccattggaacttaaaatttgtactaaaggaaagtaatttagaaaatcttctttaggtgatgtggaaacagctgtaaaatttgcaactcagcttattgacctgggagcagacattagtttgcggagtcgctggacaaacatgaatgctttgcattatgctgcttattttgatgtccctgaacttataagagtgattttgaaaacatcgaaaccaaaaggcaagtattataagatcacctttagatattattaactgaacactttagtggtggcataaaaattataattcaaggatattttttccttctaatccatcttgtttcatatgcctttctactccattttatttctgagatagtttaaaatttctttattgagtattaattactatcttttctacaaaaggattagtacagagagatacaaaatgaaagagtgttctctgggttttcatatctctataagttctccagtataacacggatgttttatataattgattctacatggtttatgattcttttgccttgcttgggtagccagaaatagaataataaggtcttcagagattggaataataaataatatttattttagatggcatttggttctgaaattatataattcaacttaagggataatatttcagttttttttccctgttttgatggtgatatcctgaaattgaagatctgaatgtctaagtcacagtcctggtattttgatttttctctctggttctcttggggcccaattttcttttctttcttttttagaaaaatatgagagcaagcaaatagtattaacgttaagttaaagtgtacaatattttccccattgtaggaacatgcttcagagattcaatagataaatttcccagaatgttcatttctaacctccaatctgcataattgtccattttctctttaaaattctaccttttcaatttctaagtgatgttgggaagaaagcctctgtctacactactgtgtctttaataattcaagagagtttgtcgagtatttctgggtggtttgcagttgtaggaagggtatgtgggtgtggtgttgtttagttgagggtaggatttgcagaaccagaggtatatttaaacccttgttatcgaaaatactcaagatgggattcccaaatctggaggatttcctgtatttaagtataacatatgatgctatgttaaacgttattaacatgtccttagagttgcaagattacttttctcattatgaaattcaaattcatttgttcagtagagtattatgaatcaatttataggtaagcatttctatgcttaattagactttaactactttgaaaattctgctttgttttacctaccaggtattggccgttttttttctgtaaagggccagctactaaatactttagactttttggaccatatggtctctgatgaaactactcagttccatagttgtagcatggaagtagccacagaggatatgtaaatgaatgagtgtgcctgtgttctaataaaactttataaaaacaggtgggctggatttggcctctgagtcataggttgctgacccctgagctaaactctactactctacctcactgtagttgtcatggcaaatatgcaacagacttaatgggagattgtgataagctgttacttttacagatatgaatttttgccattaattgttttaaaatatgttttagtttgaaaatccaagataatatcactccatcttataatgaattttattgtactaataatcaactgcttattttaactagattgtaatataaagattttgttctgttgtgaaatcatgcctctagtgggttgatttaagtcttacaaatgctataagtccctcctcccaaagccctgtcttcttttaaattatgatagctaagtttaaacttttagttaatatacttatgatgtttaattgcagatgtggatgccacttgcagtgattttaattttggaacagctttgcatattgcagcatacaacttgtgtgcaggtgctgtgaagtgcctcttggagcagggagcaaatcctgcatttagggtaagaggttaaattaaaagtgaaaaatattaaaagaattaagaaatcttactttctggtaaaatgttgaatctgaatgttattaatagaagaactcttacatgagcaagtaatttatatctttgtgccacatgtaaagagtgatgatgatctttattgtaaataaatttaaggcataatgataaatttccttttatattgataagtcccattcaggaaagtaaagtcttcctttaagtgtcataatctttaagtatctttcatttaggagtttgatgtatttatgaaaagtcagctgttaagtagcaatacatatattacagttatatttttctgttaaatcatattctaaacttttttggaaattcatttcggaaagttatatacccatttaaggatgaagtaagcctttgaaaatgaaatgtttaaaggaaaagtgtattttttaatagtaaaatttcactaatttacagagttacacaggattgaatttcatagtcttcagatcatttgttgttgttgtttttttttttcagaaagtgttctgttttccctttctttatattaataacaataactcgctctggcaggtattcttaatcgtgttatactttcccttgaagggatgtgtgtgagcggcagatagtgtgcagtattcgaaaacacctgtcttcccttccctttcctatttttcccattttccctacttctttgccagttttctttctgtttaacccccttgattaccccccaacttttaatttcttctcttcctccctccctcccttctgactatattggttattgggcactgggagaatactacaataatgtagataaagcccttgccctcaaaaagaatgtcttgcagaggggaggtgggacagggaagcagtcagttttactgtagtgtgctaattcagtgtgacatgatggggcgggggtggcagagggccatggggtcatcttcccaaggcttcaacagggggtgacatctaaatcaagtgcttacataggcaagaattaaacaggtactgaagggagggtgaggaaagcatcttaggcagagagagtagcgtgcaagaagcctaggagatgatcattcagtccagctggagtgtgaaggggggaggcgtttgcttttgttggtacagctgttgacaaagccccattagtggggacaatgttctgaatttgttaggatgccatgagatacgttattgagctaaattaccaatttaggccagaagcagattaataggttgccatattttgaaaataactacttaaaaaaaaaaaaggtaaacgtatgggtcagcagtagccctcagaccatactttgatagccgccatcttattttttaatttttattttaaatattagattcagggagtatatgtacaggtttgtgaaataggttatattgcctggtgctgaggtttgggcttctgttgacgccgtcacccaaacagtgaacataccctagcccttccccacctccttccctcccacactccctcccgtctttaggggtcccagtgtctgttgttcccatctttatgtctgtgtgtacccagtgttcagctcccactaataagtgagaacatgcattatttggttttctgtttctgcattaattttcttaggataatggcctctagttgcatccatgttgttgcaaagggcacgatttcattatttaaatgactgtgtagtatgccctatatgtaccgcattttctttatccagtccactattgatgagcacctaggttgattccatggctttgctattatgaatcgtgctgtgaaaaacatatgagtgcagtgtctttttggtaaaataatttattttcctttgggtgtgtacagtaatgagattgctaggtcaaatggtaattctgtttttagttttttgagaaatctccacattgctttccacaggggctgaaccaatttacattcccactaacagtgtataaatgttccttttctccacaacctcaccaagatgttattttttgactttttaataatggccattctgactggtgtgagatagtctctcattgtggtgttgattagcatttctctgatgattagtgacgttgagcattttttatatttgttggttgcttgtatgtcttcttttgagaagtgtctgttcatgttctttgccgctttttaatgggattttttttcttgttgatttgtttacattccttatagattctggatattagtcctttgttggatgcatagtttgtatttttacccattctgtaggttgtctgtttactctgttgatagtttcttttgctgtgcagaagctctttagtttaatgaggtcctgtttgacaatttttgtttttgttgccttcgcttttgaggacttagtcccaaattctttgcctaagccaatgcctagaagagtatttcctaggttttcgtctaggatttttgtagttcgaggtcttacatttaaattttaaatccatcttgagttaatttttgtatatagtgagtagtgggggtccagtttcattgttctgcatatggctagccagttttcccagcaccatctatgagtagagtgtcctttccctactgtttatttttgtcagctttgtcaaagatcagttggttgtgtgtggctttatttcaggggtctctattctgtttcattggtctatatgtctattttttttagcaatatcatgctgttttgattactggagtcttgtagtataattttaagtcaggtaatgtgatgcctctggcttctgttctttctgcttaggattgctttggctatttgggctcttttttttttttggctccatatgaattttagaacagttttttctaatcctgtgaaaaacgatgttggaaatttgataggaagactgttgaaactgtcaattgctttgggcaatgtggacattttaatgatactgattcttccagtccatgagcatggagtgtttttccatttgtttgtgttctttcagcagcatttcatagttattgtagagatcttccatctccttggttagatgtattccttggtatttttattattattttgtggctgttgtaaatggaattgtgttcttgattttgttctcagcctgagtgttattggtgtatagaaatgctactgattttcgtatattgattttgtgtcctgaaactttactgaagttgtttatcaggtctaggaggttttttttggcagaacctttagaattttctacatatcgaaccatattgttggtgaagagaggtaatttgacctcctcttttcctatttgggtgccttttatttctttttcttgcctaattactctggctaggacttccagtactatgttgaataggcgtagtgacagtggacattcttgttttgttccaattctcaggaggaatgtttccaacttgcccgttcagtatgatgttggctgtgggtttgtcatagatggctcttagtattttgaggtatgttccttcaatgcctaatttgttgaaggttttttttttttatcatgaaggggtgttggaatttattgattgctttttctgtgtctattgagatgatcctacagtttttaattttgtttatgtggtgaatcacgtttattgacttgcatacgttgaacctccttgcatgacttgatcacggtgaattatctttttggtatgctgctgaatttggtttgctagtaacttgaggttttctgtgtctgtgtttatcagggatattggcctgtagttttcttttttgttgtgtctttgccagattttggtatcaagatgatactgctttcatagaatgaattagggagaaatccctcctccttggttttttcatatcattttggtaggattgttatcagctcctcctcgtatgtttggtagaatttggctgtgaatccattcggtccagggctttttctggatggtaggttttttattactgattcaattttgtaactaattattggtgtgttcagggtttcactttcttcctggttcttggaaggttgtgtgtttctaggaatttagattcctagattttctagatttcctctagattttctagtttatgtgaatagaggtattcacagtagttgctgaggatcttttacatttctgtgggattgttgtaatgtcatatttatcatttccaattgtgcttatttggatctttcttttttctttagctagcagtctgtcaatcttattgtttcaaagaaccatcttttcattttgctgatcctttgaatgccttttttggtttcagtttcatatagttgtactccaattttagttatttttttgactagctttgggtttagtttgttcttatttatttttttaacgtgtttttatttatttatttttattttttattttgtttcttttattatactttaagttttagggtacttgtgcacaatgtgcaggttagttacatatgtatacatgtgccatgatggtgtgctgcacccattaactcgtcgtttagcattaggtatatctcctaaagctatccctcccctctcctcccgccccacaacagtccccagagtgtgatgttccccttcctgtgtccatgtgttctcattgttcaattcccacctatgagtgagaatatgcggtgtttggttttttgtccttgcgatagtttactgagaatgatgatttccaatttcatccatgtccctacaaaggacatgaactcatcattttttatggctgcatagtattccatggtgtgtatgtgccacattttcttaatccagtctatcattgtcagacatttgggttggttccaagtctttgctattgtgaatagtgctgcaataaacatatgtgtgcatgtgtctttatagcagcatgatttatagtcctttgggtatatacccattaatgggatggctgggtcaaatggtatttctagttctagatccctgaggaatcgccacactgacttccacaatggttgaactagtttacagtcccaccaacagtgtaaaagtgttcctgtttctccacatcctctccagcacctgttgtttcctgacattttaatgatcgccattctaacaggtgtgagatggtatctcattgtggttttgatttgcatttctctgatagccagtgatggtgagcattttttcatgtgttttttggctgcataaatgtcttcttttgaggagtgtctgttcttatttttctagttcccttaggtgcaatgttaggttgttgagacctccctgtcttcttgatacaggcgttttgtactttactcttaacactgcttttgctacatcccagaggttttggtatattgtgtctctattttcatttgtttcaaaggattttttttgaattctgccttaatttcattgtttacccaaaagtcattctggagcaagttttctagtttgcatgtatttgtgtggttttcaagagctcttcttggtattgatttctatttttactccacggtggtccaagagattcttggtgtgattttgatttttttgaatttgttgagacttgctttatgaccatggtcaatctttgagtatgttccatgtgcaaatgagaatagcatttatattctgtggttgttgggtggagtattctttagatgcctattaagtctaactggtcaagtgctgtatttaagtccaaaatttctctgttagttttctgccttgatctgtctaatgctttcagtggggtgttgaagtcacccactattattgtgtgactatctacatctttttgtaagtctagtagtaattgctttataaatttgggtgctccagtgttgggtgtgtgtatatttaggatagttaagtcttcttgttgaattgaacactttatcattatgtaatgccctactttgtccctcttgactgttgttggcttaaagtatgtttaatagtgatcatctgctcctttttgttttccatttgcatgatagatctctctccagccttttactttgagcctatgggtgtcattacctgtgcaataggtatcttgaagacagcagaaggacaagtcttctttttttttaatccgatttcccactctatgtcttttgagtgctgtgtttaggctgtttattttcagggttaatattgatatgtgaagttgagctcctgtttcatgttagctagttgctttgtagccttgattgtgtagttgcttttatggagtctatagactatgtgcttatgtatgcttttgtgacagcaagtattatttttttgttttcatgtttagaactctcttaatcatcttttattaacctttttcagggttaatatagaaatgtgaagttttgttcctgttgtcgtgttgttagctagttgcctcctagtctcaattgtatagttgctttatgaagaacatagactatgtgcttaagtatgcttttgtggtagcaagttttattcttttgtttccatgtgtagaactcccttaatcgtcttttataggtccagtctggtggtatgccaccactttagaagaaagtggaattccacaattgatcatgaataagccttcttgtcttaggaagatatcgtcattgttattttattattcttactattatttaggttttttttttttaacagaagtttcgattgttgaattgtatgggaattaacagaagtgtgtgacaggttccaaaaagtggggatataacaaaagtccaaagtaaaatattcactgtaagcatagcttacaacttagcctgggtgtattttaaaaatttttatgtttccctatttttctctctctgttttttagagagtatacattagtgtaacacatatctttattgtattttgtatgttttcttgaaatctgggattagaagagtccattaccatcctagacatctaataacatatcttcttgccatatttctactaaggaccaacctgacttgaattttaaaacaaaaaaatgcgaagcaattgcaaactaagtgtgttctaaaagcctcgttcatttttccatgtgaatcatttgaagaagattgtatcagtgaagaaagggaaaaaagtttctcagttaacaaaagtatctttattctttatattaaaagaagattacaatctaaattatttctcatgaagtctaaggtttttggttagggaatgtaagatgacagataattcatatgatagggcttttatgatacatataccatgcaaatgaccgtggggttgtcattggccattttatcttgtcacaggacaaatcccaggatacagtctttctgtcatagtgaaaacagagcttttttcttgattatagcccaggttttagtagtatcaaaaccatagtttctagttttgaaatctgagttaccccatgaatgggcagggggctgaggtcacagagccaagagggcagctctggaaccatggatctggggctgggaagcgtcagtcctgtgacttttgtttccaagcttgctttctcatgcctctgcgggcagaatgctctccgtttaggacctgagcaccgctccccacatggacgccttgcttttccctgccagagaacctgcacagctcctccctggtctgctttggatctctgtggagatgcatctcatcagtgaggcctccctgaccacttaatctaaagagtttcccctacaaccatctctgtctccacatttcctattccccttccctgttttttttttttccctccaggccacttatgactgtttattatgccacatataatttacttgtttaatgttgtatggtctatctctcccaccagaatgtaatgttccttgagggcagggcttgtgtttttttcactgtaggatctttagcacctagaatggtgtctgcatattgtaggcgttcaggaaatgtttttgaataaacaaatgatgaatgaatttaacgtaaagttcttccaacagaaattttatatgactttctagtgctctaagtaagagttgaacatttttctcttatctttatttgtagaatgacaaaggacagatccctgctgatgttgttccagacccagtagatatgccgttagagatggctgacgccgcagccactgctaaggaaatcaagcagatgcttctagatgcggtgcctctgtcatgtaacatctcaaaggccatgctcccaaattatgatcatgtcactggcaaggcaatgcttacgtcacttggcctgaagttgggggatcgtgttgttattgcaggacagaaggtacagtaagtaactgcaatctctgaagccagggttgttatgtccatgacctatgttcaaggacacagtatggtcagagttttgagtttttgaaaaaggttcaacatgtaggtagaaagatgcttaatggaaaatgtaaaacttagatatgaatttactgttaagttatgctttaagaatataaactacttgaacttaataaagaagacatctttatttgaataaagagtggagtggagtagaactcttgagtgaatttagaagcatgagctaagggatgatctaaggtggaggattatctttgcagtcccctctttccccagtggtacttctctgactgctgctcctccatagaaatggagcacaggagacccttgctgttcatgggtgtttgtctttgggttcccacaaatagggcagtctgagatattatgtaacctggtgataaggatttgtgtggaaaagaggactcctactcccatcatccagacaccttttttcctcccaagcttttgtttccatattgtattcatttattgccagttgctttttaaaaatatctcatatgggaggttttcttgttttttctttttttaattattttattatactttaagttctggaatacatgcacagaacatgcaggtttgttacgtaggcatacgtgtgccatggtgatttgctgcacccatcaacccgtcatctacattaggtatttctcctaatgctatccctcccctagccctgtcccttcagttttttcttaatattgaggttaatagggagcttggtatggagaatggaacagggaattcctgcttggatattgagtttcccaacatagttatatccctttttttttttttttttttttttgagaagagtctcactttgatgcctaggctggagtgcagtggcacagtcataggtcactgtagccccgaactcctgggctcaagcaaccctcctgcctcagcccctgtagtagctggaactacaggtgtgtgctactatccagctaattaggattcttatgtcttcttggaaattgactcccttattattatttaatgttctttttcatccttggtaatgttcctggctctgaagtgagagcaaggaacattaccaagcataaaaaggtaatgttgagagagcgaatttttaaaattcactttgagagagtgaatttttaaaaactcccatggtgaagtaaagttgcaagagtaggacccttggaattactaataattccccaaaattattctggtttatattttctttaggttggtacattaagattttgtggaacaactgaatttgcaagtgggcagtgggctggcattgaactggatgaaccagaaggaaaaaataatggaagtgttggaaaagtccagtactttaaatgtgcccccaagtatggtaaggttgatattatttaactcggtaagaattaattaaaaataatcaagttttactcttttacagttgttaaataaaacttttctcctgatttcttatgtgataaatgaggggcatgtggatgtagggaggactttttaaagataggagatagttatatttatttacactgacgagaggcgacgtgagagggagaaatggtggttgcaggagagaaaggggacatttccaggaggaaagtcctgaaaaacttgaaagggaaaaggatttcagtataagagttagccttgcattagatcaggcgcagctttccactatttatttatttgtttgagacggagtcttgctctgtcgcccaggctatagtgcagtggctcgatctcggctcactgcaacctctgcctcccaggttcaagcgattctcctgcctcagcctcccgagtagctgggattacaggcatttgccaccatggctggataattgttgtattttcagtagagacagggtttcgccatgttggccagactggtctcgacctcctgacctcaggttatctgcccaccttggcctcccaaagtgcagggattacaggcatgagccactgtgcctggccaaccatgaatttcagaggccatgatggaaaggtttaggagggtgtctggtagtgactggtgaagagggcatctgatggaattgtctcaatgatgtttttgggaaagtgtctttcttgggactggtctcttgggtggcttttagtggggagacagtgatgagaggggttttttcgttagtaggctgtgagctgttgggctgcccttgattcttgctgccagcagtatagtgattgggagaaggcctctgaccaggggcacgcccagctctgcagacctccctcaaatcctgcacctagtagtgttgtggccaagggagggacttggttatcaaggaagtacagagctctggaggtcatgaagaacttggaaaactggaaaaatcaagcaaggccaactttatgaccgcattcctgaggtttctttgaaactctgcgaggtttctttctctttctgacaaatgtttaagtaaattctgacaaatgtttaagtaaattctttctgacatgtttaggtaaatttattcttcctctctctcacacacacctatcctgtctattgatttcaatttgattttgtagtcacttactatgttgtgaatacttttccttgaaatgaaatattcttttagaacattgttttccacgattgtgtagtattcatcttgtggcctgatggtgaggtggtgtggtatgatgatgatgatgaagcggatggactttggagtctgactgcttttgtgtgattcgatttctttacttaccagctatgtgactgtctttctcttcttgtgcctcagttgtcttctgtgaaatagggatgacactatcataaggactagtgcaagaattaaatgtgttggtaaaagtataaagcacctagaacagtgcatgattccctgtaagcactcaacagatgagagctgttggctatcacgcttttatcaaaattaactagtttcctttcatcacacacttaggatggaatctcatttttttggtctattaaaactttttttgtttgtttataaaaatgctgattgtataagatttgaaaacaagaggaaagtaaaaattctgcatttttatttaatatcctagtgtaatttccccaaatctttacatattgtttgaaaatttgattttgaatagctccatttcctttaatttttccaatttgacagatgaaaatttctatattttaattggtatttctcttattgtggtgaaatagaacactttttaaagtgttttgttgtagtataggtattttttatgtttcttggcaattgcctgtttgtattattttcccagtaaaaattgggatattagtgtgtcttttttaaaaaaggatgagttttaaaatacatacttatgatattaagctttatttattatggatattttgtctagcttgtcatttgcctttgaacctcatttgcaatgttttttggacatgtagttttatggcttaaagacttttatcaattcttatattacttttatgctttgataattcttcctaatctaaggattatacattttatatttctttaaatgtttatatttttccttttatttatagttggcactaaatatttgtatttatacaaataattgtacctatttatggggtacagaatgatatttctgtgtaatgtaaggtgtaattaaatgagggtaattaggatattcatcacttcaaacatttatcatttgagaacattcaaaatcctctcttttagctttttcaacatacacaataaattgttgttaaccatcttcacctcacagtgctgcagagcactagaacttattcctcctgtctagctgtaatgtaaatgttttaatttttatacttaattatgtaatccatttggaatttatttggttagtagtttgaggttaagaatttaattttaattttcctccgatagattactttgccacctgtcaagcagattaagggcaggatcaaaagcctttagcaacacatagggcagaggtaaatcagaattatggaatcatttagattgccagcagaactcatggggactcccaaactcccattatcccaaggggaggcgtgcttgattggcacaaagctggatacccccgtccccttgtatgtactcaaaggcaagttgtggggcaggggtcatgtgttggattgtgtgaaaatgggtatagcccttgacagccctgggagccccaggtcacggctaagctacttaaggtggaggggaggggagttggggaatcccctggctaatcagaagccaaggaatttctcaacaatggttttctctctttccaaatctatcatcttttccctttggcttgttgtgctgcttttattatagattaagttcttatcaatgctatggtatatttcaggcttattttgttctattgatctgttaattctcatacctattagatttttttaactgtagaaaatgataagttttaatacttggtggtattactgtttttatgtcttttaataattgccaaagtgaatacatatacttagtttactcaagtcagattgtacggcaaggcttattacaaaactgtctcttagcttgtttttctctgccctcaaatcctgctccttagaactaggcaagaactttttcaactcttttagctgtattgtctgatattaatatctgtatttgtaactaatatatttacgtgaatctctcttgatttttccagttcaagacatctagtgagtttgtactatgaagagagagatttagttctctacatgagacaacaaagtattaccttaaatatactgagagaatatgaaacccaatgtagcagtttgttggttgacttgtttttggtatagcctgtccttcagtagctttctgacaaaggactcatgagaagtaaatgtgttgagaccttctattctaaacacatgttgatttctcccctcaaactttatgtgataatttgggatgaggaaagttagattggatttcatattctctcagtatatttaaggagatactctattgtctcaggtagagtttgacagactttttctgtaaggggccgcatggtaaatgttgtaggccttgtgggctatgcattctctgttgtacctgctactcagctttgctgttgtagtaaacgggcagccataggcagtgtgtaagcagatggacgtggctacggttcaataaaaattgaccaataaacaggcagtagccaggatatggctgttgggccatagtttaccaactactatcctgagcttccagtgttgctgttcagatgttttgaagtattgttgtacaggttatttagtataaaatgaaaaaggaaaaacaaaaagtaggtagaggtttttccatcttctgtttttgaccctttcctccttcttggaagcgtttagtattttttctccttttcttttttttttttttctttagagttcataccatttttattccttaccgatattttagtgggggttggagaagaagaattggagttaaacctatattcagtgggccatgtttatctggaaatttgttatttttgtctttccaaataattcatcatgtgtttgtttttagttaagccttacagttacatgtcgagatttgagaaaagtcctatcaatacttcagttagcctgagtaactgagtaatagaggccgcccatatgctatgcatccagtcattgctttacatttagttttggttctctgaaatgctttggctaataaaaaaaaaaaaaaagaagaatgcaaactatatagatgaagttttatatactacggaaatctttttaagccatagaattaaatatttaatttaatacacaaatatactttagcttacagagatttcctggtgagatttttttgttagaaaatatatttattattgatagtgaagtaaaggtgtcagtagtcatgatagaggttatatcagccaaagttgccttcatattgataaaaataccttattcacttataatcataaacattattccagtaaaagaggtacattttctctccttttcgtctttttgcctgtgtgatcaccataataagttaaaatgaaatagctcttacataataaagggagaagagaaagagagagaaagccaacatgctacatcctaggcaattccacccagcactgctgcctccagtggtgtctcctcttcccactccaattaatttagccttctaccccatcccactttgttagggggaaggttcaccaaatgatggggttactcagaagagaaacattttatggtcagtggaagttgaagagaaagtacaaaaaggtggagagggctacccttctcttttaatcatcgtaagagggtttactaatactgaaaagtgtccttcagtgactgtttcctgatctaggttttggcccttcaacttgctgctgttcagaaaaccacacgttttccctgacatgaagaaaaacataatttattgaacattattatgacattaatgacacaaatcaaacaaatcagaaaaagactccatagcttgacttctcttataaatgtttattttaggtttcttccaatcctgcctgctgcctgtattcacacatacaatttttcacataatgtaatcaaatacataacttaatttttttgatttgctctttttttttttttttttttttttttgagacagtctctcactctgttgcccaggctggagtgcagtggcctcccaggttcaagcgattctcctgcctcagcctcctgatagggattacaggcacgcaccaccgtgcctggctaaattttgtatttttagtagagatggggtttcaccatgttggccaggctggtcttgaactcctgatctcaggtgatccgcttgcctcggcctcctaaatggctgggattacagatgtgagccacagcgcctggcctgatttacttttcatatttttctatatttctacataatctttattgtcttataatgttataatgatatagtggtttatggatatagtgaattcattcatcatattggcaggcaattatgttttctcctacttatgaataatattacagtgatgacatattcagatatacaaccttttcctcctatttagagtattttctcatgattcatttccagaagtgtgattgggtcattgtagtaaagtagaaattgtgtcacctcttgaaatgtatttttttcttttagtatacagatgaaaccttgtaacgtttgtcataccattaaatataattatttctttaaaattaattctataaagtggattaggtcaagatttttgttttctaaaaagatcatacaaatatacattcccagagtataaaataatttctttcgtcaaacccttgccgacactggttgtaatcatcatcatcgtcgtcattatcaccaggcttgagagagagagagagtgtgtgtgtgtgttagggaaggaaaataatttagagaaagaatagaaagtcatggaaaatctcataggtaggagacagaagagagaacattgtaaataagtttaaaaaagataagaaaatcaggataaagtagtatggactctgaggtgggagagaattttaagattagcaggaaagtagtgtagttggtactttttagttattaacaaagcactcacttcttacagagtctcgagcatttctaccctgctttaaaacaagttgtttttgatatattccattttagtcataatgtatatttgctagattgtaaacactcaatgaaagagtgtaatatacatattatggctttattttcactttttaaatatcttagccagattatttcggtatttatagtctgtattcactatctctaatgtcggtgcatactttgtatgctggttattttattgtatggataaactcctttttggtggaattttgtactcccagctgctgcagataggcaacccccctgcccctgccgctcccctccccaaagtacactgtattgtttctgattgtcaggacctgagggccaggccttttaggaagattatattttatagtcagaaagatttattttatccctgctatgtgtaacacactgtaattaggtacagtgggggaatgcagagttaagtaacatttaaattttgtctttaaaaggtgttagtctggaagagagataagaaagacatggacataaaaagctataatgtgggataaatataacttccaaaggagttgtaagttggcatggaagaatagatttttatgctctatggctcactgttatttgccaattgcttagaaatgatagaaaaccaaattgaaatacataggttcaaatttcagatttatggcaaacagtcttcaaatacaatacagacatttcttaaaagttaccgtaaaggttaaaaaaaatgatagaaaactatcaatattacctttactcatttctctttctcctgaatttcacttaacacctgaaatgtggttcttacattattgacgtgttgttagtcttgaaaactagattgtaagctctttgagggtaagtactgtgtcttacattttttttcctctcatcataggacatgcagtgggcactaaaggtttatattaaagatttatgttactaattagttgtacttgttcctttatttgaaatgttttaattgtttaacactaaaattctgcattctcccttaggtatttttgcacctctttcaaagataagtaaagcaaaaggtcgaaggaagaatataacacacactccttctacaaaagctgctgtacctctcatcaggtcccagaaaattgacgtagctcatgtgacgtcaaaagtaaatactggtaggtcaaaccagaaagttaaccatctgcttcagtgttttaattttatttgtagaattcctaatatttagattgcttcacttttttttgttagccaactctgaaacctgaatttaataaaacctgcatcttatgtgtttttaaacctcaattttaatgacttcagttcctaacaaatgtatttcagatttgttccttccttttttctctttactgtctccatacctttatcacacataatctatcctcaaggctagatttcatactttcatcaaatttttatggaacaaaactagctttaggctccttgcctattgaaggatgtttagtgacttcttttttaccaaaaaaaagtcctgactcgggaaactagcagttgcggctctctttctttattgatagagtctcacacggcttccataggtgaactatggaagttctatggaagaactatggaagagttctatggaagagaacggtttatcgtatctcttccccatcttttacgtacattttcttactcctcccttcatactttgtctcatgctatttatctgtgtgcagtaatttgacttctgccttttgaggtcctcaccatttttttcgacttcttattcatatcctgtctctagttcactttaatctcctcattccctaactttgtatgtgctttttttatccataccacccaattgttatttgttatcttgggttttgtcctcggattgctttatttgtgcaagtgtcctattctctcggcaaaattttaaactttaactgaaccatgagagtaaattgtagtgttgttttcactgtagcaatgcacaaaacaggtgctcaataaacacttggtaatttgtaaatagttgaggtagaaagctctctaccaggatgaaaggaatttgtccaagaattaggctggcctttatattctgttccactgggctatttgaatatccctgtgtcaatactgcactccataataagtagtttttaaaaataaatcttgatgtccagtagtggaaaacctcctatctcattcttgatcattgtcttgctgatttggggcttttataaatcacccttccgtatacattttacaataaactgttaagtttccttttaaaaattctgttgaggttttatctgatgttttagttgaagcttaaatcaatgggaaagaactgacatctttacaatagtcagtttttaaattatgagtttagaatatctttctgtttaattaggccctttgaaaatatcccaacaaaattgtgtaatttttttctacaggtattttatatctgccttgttaggtctattggtaggtactccatactttttggtggcattataagtagcatccttttaacctgaagcccagaagtatacggtaaatatagacagaaagctccaagagaagccccctctatttctggtctgaggagcagaaaaggggtctcctattagatagaatgtggatgaaatcacctgttatctttattgcttgccttttctttcccttgtttcccatccagtccccaggcagtcctacgtggtatggatgggcagctgtgaatgggcaggcacccgaaaccccaaggaagggaaatccatgtctctgaccagagaaactttggtccaaggacatagatggaatccacattggtttttcttctgttttctcactgcttggccccagaggcacaatcagtctcaggattgtatgacagagcaaggaaacgaaagcttagacattctactcagaataccgggaagggatgcccaggagcaggaagtgtcagggaaatcatagagaggaggggactcaagaaagaggcctcacaattttggctgtgaactcctaggtcttcttgcaagtggtgtatgcatggatctgaccaaagcctttggtctccttggtagaccactgcttgggtcccagcctgactactgggctgcacagcacatgagacaaattcaaacagcattgcagaggctgcggaagcggaacccacatcagaaccacagtgcacagagggtggtcaggaacttctgcccagaggctacatgggttgactgcctgctaaaatgaaacagtcaacatcctccataggatttaaacaagacctattccagtgtccatacataatattcaaaagacacaagatacaatttaaaattacccaaaatatgaaaaagtcaacacctcttacaaggaaaaagacagtccaagcatagcagctttgagatgacatggacattgcaatgaacacataaagattttaagtaatgtaaccacactccaagaattaagggtgtagctgggcattgtggtgcacacctgtagtcccagctactctagaggctgaggcaggaggatcacttgagtccaggagtttaggctgcaatgggctatgattgtgccactgcactacagcctggctaacagaacaagaccctgtttctgaacaaaaaaaagaatcaaacgtgaacactcttgaaacaaatgaaaagaaagtttcagccaagaaatagaagatatgaaaaacaaccaaatgatacacccaagtgtatacacacacacacacacacacaagagtacaagcagaactgtggaaatctcagactggtgaattgtatcactgccaacatcctggttgacatattatacttattataccacagttttgcaaaacattacctttggaggaaacctagtcaaaatgtacagggaatctccttgtattattttttataaaaactttaaagaaaatattttataactgaaaaatgtaatgaaaaataaaaatttactcttcaggttgccttcacaaaatgtctcctctccaccctcttcattcagtttctgctgttggagttcaggctctcatgcttggactatgctaataatgtctgactggtccctgcttccagcctctcccgctgtggtttcgttgcagccctgctgtcaggagagtgttatttaactagactctgttcatgccagtattccttttcaaagcccagcagaggctccttctttacagaagagttctcagtccttagctgggcactggcatccctgtctgaagtgttactgtgacctgtctgtctagtcttgcttttcctacatttcataagtactctgttccagccaagctactcactattttctgtgtcttaagattttctttttgtccatcaagaatgcctgccctcagttcttcctgaccatacggctagtattctcaggaagaaatctgacctgtcccttaggacccatctcagaatgtgatcatcttgatgagacattaattgatctttgtagccactgttactgtctccttctcgtatgctagtgcttataccaaaacatgtcctcatatgtctgtgcagttgttatccaatatgttttcagaagtgagtgagatttcgataatgagggatgcatgtactttaaaaaatacattttatgtttaatgttaaaattcttgcttaaagtgttttatttttgtgtccaaggattaatgacatcaaaaaaagatagtgcttctgagtcaacactttcattgcctcctggtgaagaacttaaaactgtgacagagaaagatggtaatataccttgtaacctctgtttctcaaaatttaacttttgatggaactttaaaatatggtaggaaaacagtttatatggaggttaagttttaaagttggcaagggaaaaattatagtaaaaattaaacttggaaatcactgaagcagctcatagcaagctatatacattatattttttgtgtgtaaagtactgcattatgattcttttacttaaattagataactactggactagatttaagaaaataaacggaaattccataatatagagcactctacacaaatgtttcatttgcctttagctatcaaatcattagatgaattgagcatgagtattccttcttgccttctggtttaactcaaaatgtcttaatattaaacttttgttgccttaaaacatattaatatcatgtttaatttttgtataaaaggggactctactatgtcatctaaggtgagaggtgactgatggtcattagattaggtagtcagttcacatcaattgatgtggtgatacctcttacataagattgtgatcttaccgtgggaatccttaaaatattattgcttgtgttataaaatcttttatatataaactacaattgctatttggatgaaattaggcatttaatttgacactagataatccataattgaggaagttaaatgaagaatttcagaaagatttgccttgacaagctgcttcttggtccacatcttattttccaccgtttgacacgttctttatctgttacagttgccctgcttggatctgtcagcagctgctcctctacatcttctttggaacacagacagagctaccccaagaaacagaatgcaatcagcagtaacaagaagacaatgagcaaaagcccttccctttcatccagagccagtgctggtatctatggctttttcaaccaggctttcttggtgttttttatcttggtttgtttgtaagtagatttgctctttttaaatgtgtagaaggaaccctttacttcaatcagattgaactacttttactcttccccacctcccccgaaccttaagccttaaggtctctttgttttgccgtctcagatataagactttgcatttattttcatgtaattcattcttagtggttttacctcatctgaatttagcttcttcacaggcctttgtgtcatcttcatatttaaaaagcatgctttctgtgtttttattcaagtgattgttttaaaactatgtttgcttaaaacctaggagaaggtcagagggtcctctcccaggatggcaataccagccagttttgatatggctttttaactagccgtgaacctgcataatctcactcagtccacatttcttcagttatttgtaaagatacgtaaaacactttatcagacttcttttcgaaatgacatagattttgtctgttgcagttcacttatttgcctatatagcgaacttgtccagaaaggcaaaagccatcttggcaaaatacgttcttcatgaacctctttattaccagattctttttttagtgcttctattaatagttcttgtagtgaaccaacattttattatggaaaatattcatgacagatttctaaaaaaatacttgatgggaagaaacctccaaagctctcaacaataacattgacataataagcctaaaaactgggaccctaaaagtagagaacctgaaagttttccctgaaattgtttgcctggaatatttattctctgagtggcttcctctctccataccccaaccagtttttctttatgttgtgaggagcagaggtgagaaggtacagtgctgacacagccatcctgtttgtccaaatttcattcacattttaaggcccccttcatttggtatttgcacttttgacatttacttgattttaaaatttatacatgggtatggaattacttttttttttttaaccttctaaacaaagtagtctagcgtgcctatatatttaccatttaaaaaaataaatttgagggttatgtcgacttaaacaacagtgaagatgaagagagttatcagagtgagaaagaggacctttcaaagagggagatgggccgagaatgggagatatgggaaagtctgtgttgggaaccccagagacatgtacttaaaacatgtttctctagtgagtagatattccacttgttttatagatttgcatttgagggagatgtagactgcagagaacgaacaataatggaaagttaggttaaaaaattagagaaagaagagtggaaataaaggattcggggaatgggaaaggtagggacctcggcctcatcatatcccattgttatttactttttattttttattaaagacaaggtcttgctgtgtcgcccaggctggggtgcagtgttgcaatcatagtgactgcagccttcaactcctggacccaggtgatcttcctaccttggcctcctaaagtgctgggatttacaggcatgagccatcatgcccagcctgtgtcccactgttgaacttgccatctttggttcattgtctacaggcgacaaggggacgggcctgaggatttctgatcacagagtcttggttttaatctaggtgtaccacttactggctgttaacagtgtgtcttagttaattcctgagtttgtatcttatttttcagcataatttttaggaaaagcactttgtaaactatgaagtgctatagaatattggttatgatgagggcctcggacttactggtataatccagaccttctccatgggtttattttccttgtttagttgctgtgtttttgatttcttcttttttcacagtatgacttaccctccatcccatgccctcctccagagttctctactccctctcagatggcagctcttcaaatctttgtttatgtactgatgggacaaggctcaagcacccacttcttctctttcagctgttatatttgaacagctttctagatcatatttctctaggacttctatgtttaatagtgggcatttcaaggtttagttttgaatcaggttgacagggcagtggttttgttcttaataacaaaatcactttaggataattagaaccgtatagcaatttaaccttcaaatcacactacttttggctggtcacagtggctcatgcctgttatcttagcactttgggaagctgaggtgggaggatcactcaagcccaggagtttgagaccagcttggtcaacacagcaagaccctgtttctttaaaaaaaaaaaaaaaaaaaaaaaagtcaaatcacatgactttttatataatttacactgagtctaagtgaactattaatactataattctagtattttagtagaatagaaattgtcaaactatggcccatgggccaaatctgacctaccacttgtttttgtaaataaagttctttggaatgcagccatgcacatttgaaaaaaatatattgtctatatctactttcatgctgcaacagcagagttcaatagttgtggcagaggtggtatggctagcaaatcctaacatatttactgtccagcaatttgcagaaacagtttgctgtgacccctgttctagtagagatgctgcaggcaatcttggaagagttggtagtttaccagggatcaggttttgtgaatttcccatggcagtaattttcccaggaaactcttcacatttcctttgagcagcttgacctcacatgtgagaaacacaactgtagatgacttatgtgatgaaaggcatcagatatcaaaatcaccaactaactagactagttagaatacctagtgtgattttttggctaatgtgctttttgagtttttctccctttgttttttctcctcttttcctgccctgcccctgtatccctccctgacttaaacaggtttgaattcctcagcaacatctacagcaaataatagccgttgcgagggggaactccgcctcggagagagagtgttagtggtaggacagagactgggcaccattaggttctttgggacaacaaacttcgctccaggtaactcatctgcatattttcttaacttgaattctttagagtacaaaaggtttaaaattttacatgtaaatagaatttaattgtagagaaatcttgatgaacagtttttgtggatggcagctatagtacagaaaatgtgaaatgatgatgaaaactcagactgtttactcacgtggatggttacccatacatttttttcttgccatttgtgttttaaatggtcggtgttaaaaattagttgtcattctccaattttactcttactgattgctgggtgtgctaagtgacaggcaaacattttaggattagatttttgctacggataatctttaaaataagtagtaaataatgagttaattgtatacctttttaaaagagtggcttgcagagaaaagcacacaaaagggctcaaaatacatgtttttggggcccttaaaaatacatgtttgtgtatttatatattcattccaatctatacgtaacattgtttccaaaagtaaagattactttctatttttttttttgagacggagcttcgctcttgttgcccaggctggagtgcaatggcatgatctcagctcaccgcaacctctgcctcctgggttcaagcggttctcctgcctcagcctcccgagtaggtgggattacaggcatgcgccaccacgccccgctaattttgtatttttagtagagatggtatttctccatgttggccaggctggtctcgaactcccaaactcaggtgatctgcccgccttggcctcccaaagtgctgggattacaggtgtgagccaccgtgcccagccagattgctttcttttgtgttgtcaatgattataattttaaacagaagtcggttgaacaaaaccaagtttgtatgtttagatagcaatatgctattttaacacatggtggcattgcagcattttaggaaaaggttatctagaacattgattaaaaaaaaaaaagtttgtagcatttagccaagaactatgagggatctgagattttaccctatttgcaagctaacaaattcgcctgccacagtttcatagatgttggtggaagatactgtgagtactagagtcatcacaggtttgagacaaagcactctagtactcacagtcatagcagtagccagagtatcagcattttcttgaactattattcccttagtgccaattcccacagggtgagagcgagcgagccaggtgtcacctgcacagccagtgttttttgttccaggagaggaccctagagcttagggaatctgaatctttgaacttatggtacacatccctgccatttgctctggtgggagatgctagctctatcctccaaggctgtcccctatacagatgtttatgaaaaggtagtctagaacgaaagtagtcactgcctctacccataagacatgcggaaacatgacaggaccataggcgactgtctcccaacacagtcttgtttcactaataccacttataattgcaagccaactgcgtgatttgagttaggtgttttataattcatgactttcttaggtctccaggtagtaattgagattagttaggatatacttaatataggattcaaataaaaacttaaccgcacaggtaggttatttttttacaattactatttgtcttttgagttccctttctctgatgttattaaaccaagatagaatggtttgattctttggatataattcttcattttaggttgatttcagtttttaaattcctaatgtaaagcatttagaaatttgggaagtagtaagcaaatataataaaaagtggaaacttttttgttaaaaacattctgtcctgtaaggaagtagtagcattaaaaattaatcactgctacagaacagtggtaatatcttaagtatttggaggttataagatctagatttgagggaggtcatatttggtctcatcagcattttttatcagtgccaccttggaaagaaaattaacatttaaatgggaagatatccataccacaccactgccaaagtgtagtctttattgttaacacttgtcatatgtatttctgctgtatgctacatgtttccaagagttacatggttaacattagcaattatatggtaaattaaaatgggaaaatgcaaaaattatataggaaagcataaaaggcagaagcaagtaaaacttggaaaattgtaactgtagcactgagaaataacagtggcaaccagactaacctggtttaggacatgtggaaatgtgatgacctatgttcagagcgttagtgcagcttaacaatagttttgtaacattacttgtattacatagtaggaaatggactcaggtatcatctttttatacatagaggaaaaaaattaagaacttgtgagttggttttttagaaggcatataattaactctttgaactagtaatctggaagaaacactatttttgtaatttgtaataagtttcttgatatctatctcctgtttttttacttgatactgattataagagaccaaatccaattactactgtacactccttttaaatcacaagtaaatggactactagatacttctaattggtcttgaggcaccctcaattagaaaatccttattttaggattttgtgtccatttaccttatattgggtaaaaccacatttaaagcaaccttgctactttaattttaggctgtctagaaaaggaaatcctgttatttccttcagagtaggtccttttaaatacaaaaagtctttaaaataattctccctattagctaacctaaaccttttcatttaggtaaaaaaaaaaagatttttctttttaccttgggtggaaaaaagaaaagaaaaagcactcatcatgatgtctagtggtattttctataatatttttgtccttctttaattatttgagcactgtttgtggtgttctaatgttaggtgagtaagatgaaaagattgcatgttcattttatgatttttaaatctcaatattatgtttcacttctttcactgaaacactatattaccaagtcaagaacagtttttcactgcagcttttagatatattttggtcatatactgtttacacaattgccaattcttgccaaatttgtgtttgtgcattttattttcctcctttaatgtactgctctgcaattatgcttgtaaaatgtttttcctgttcactttttgaattttcaaagtttacaattttataatttgaaatcttaatgagtatcatgatcttccctcattttggtcatttatggaaatgttaaaacacctcgactttggttttgtatagtagcataagagttttggataaagtacagatgcttttgaaatgcaatattcatgttctaggatattggtatggtatagagcttgaaaaaccccatggcaagaatgatggttcagttggaggtgtgcagtattttagctgttctccaagatatggaatatttgctcccccatccagggtgcaaaggtgagagaatgaaatttatgtttatttacagaaactttttgtaatctgcagtggttaatagagacactaattttatattaaagatatgctctgattgtagctcatgtcttctttcaaggggttaaccaaccaccttcttcagagagaaggctcatggaaagctaaatttgctttgctgaggatttgcaattttaaaaacctcctttattcctcatttgcaaaccctatgagtatgtgtaggctattagaagtggcgtttgcagctaagtacagtgagagcagcaagcttaatctgtcatgcaaacaaaagtaaaaatgctctctgattgcttcagtcacatcctaactacattaaatttcctgccagcaggcaccccattcattctcctacaaacctaatggaaccaaaatggctttttcctctgatttctttagttttcaaaaatagataggcagtagatctttgggggaagtgaaacttcaaggatttttatataatatatctccttggtgtttcttcttaagatagtatctttcataccacctcatccggttttaaaaaataagttgagcagaaacaaagtcctcataaaattccaggtatcattatgtgaaatggcttctcttatgctctggaagaagctgcttggtgtgccttttagcggatgggaaatgggatactaatctttaaatgagagataacatatatggcataatcacattcatgagactagacctacgatcgcaatctgggagtcttgtctagttttcccttacaactagactgttgtgactatctcctggcagattgaagttttacatccatttctccctcaatttctttttctgagtgaatcattacatatttgtttagtattaatttccttctatgatatacttgacataattttcttcatatttatggtgataacagaatttaacatacaatactttgtagtttataaagtattttcacttaagtgttgtttcatttgatcctaatattgatcaggtaagctggagaataataactattacaaacatttgttgagcatttagtgagtgggtgggctctgtacagtgtgctttagatgcatacctcattaattcccccagaccctgcgagctgtaagttattaggatcattcccattttgcagatgaagaaacgggtttcaaagagataagtgatttagctaaagtcatacagctaattagccaaggagctggactcagcccaggtgtgttactttgtaattgttttttctgtaagcccttgcttttagatggtttgttctttctttctttcttttttttttgtatttgttttataaatgaagaaaaggaagcagtaactacgaatagtgcttatacatgctggggtctgtttgcagggcccttcatgtattaacctgtttactgctctccagtaaccctgtggtgcaggcaccatgttccctcaatgaggaaagtaagtcacaaggggtgacatgtgctgtgctcccagctggggatttgaacccaggtagtctagtatcagcatgtgtgcccttaaccgtaaccctataacggttagaagagcttcagggaccttcgtcaggacatacatcttgtaaataattggtttgggagtaaaatgcatgctgagtcaccagtgaatcttctgtgttctcatgttactttgggcatatcttcatcaaaacattgcagcagtctcttacaagttttgtttgtttcctagtcatgaggactgggattctgcttttcatgtttgattactcagagtacatagtttggcatattttaggcacggtaaatattgatccaatctgattcctagttcagtggttttatgctgtaacagctttttcctcctcctttacgttgtcaagccactttctcatggtttcatcttttccttcttgctttgtttctggagcacacgttttttacttttttttgattgccttctatttggttttctttaaggtggtgcatttaaaaagcagccccctcttcttcaaaaaaaaaaaaatagggctgtctctaaatgaactgctatctcaatccagctgtcttcctgtcatcttctgattgtctcattcatcatcatcaaatactattaagtgtcttttagcacttatgctgtgctaggcattctataagcgaataaaacagacatggtccctgattttgaggcgtttctaatctgaaccagctttggaactcttgaaagataccactgatcttcaagatggaagaattttaaactagggactgcttgaggacagtcttaataaggtagtgtccagtcacaatcacaccttgcatcttcttccttctcaggactatggctggcctttccccccacccctttctgtttgtaaaatgtgcttcctatcccagaatctttgcacatgttattttttctgcttggatggctttctacacccgcctactattgcctaactttcacttatttaatacctttcttctgctaatatatgaatcagtcaaaacttctttagagaaactctaggaaaactcactgactaggttaatcacatacacacacagacacacacacacacacacacacacacacacactgctcaagtaatcttcattagcataatattcactttcttagttcttactattattaggcacttactactaatgaactgattacttctagaattcactccctctcaactgtctgttactacttcattcaaatatccattctcttcataaaatcatattctttgtgtccatcagtctctcattgcagtatgttgtatatcatgtaaaaatgatgcctatgaattgtaatgtgaaattgcaaatatttcaagagttgaaggatttcttgatggtaataagatatgctggaggaagtgattgacaaatgaaggctttccagatttaggtcactaaacagttgaaagaaaatgagcctgtcaggattgactttttaaagataaagaatgatttgaatatcaaaaaatgcaggaaaatccactgggaaagtgacctttataattgtggcttagagtcaagtataaagtaaaagatgttgaattgtattagccatatagttttaccagaaaaatcactcacacaaactcagccaatatctttttctttcagcttaagaattagtgcctttttcacaatattaatctaacatttgttaagtttaatataaaataaacttattttcatattttttagtttcacctttgaagatgaggttacaaagaaattcaggtccatattttaggtgaattcacttgaatttttttctacactaattatctttagatagtgagaacctcttctatttaattattgtttttcttccatgccagatggaagttcattcctggcttaaaatggaccctccataaatatttgtctgatgaatgactacaattggtgtgaaaaacttagttgataaccagtcttaaacctgaagaccagctacttctaacgagatgtcctttgttttattcatagagtaacagattccctggataccctttcagaaatttcttcaaataaacagaaccattcttatcctggtaagactacacagttttgtgttcctaatcaatatttctttgctttcatttattgaaaaatttttattatgaggtattgtatacaaaagggtctataaactgtatttgtatagtttttgtaataatagaacaaacatctgttacctgtcccctggctgaagaagatgataacctgacctgtagaaacccctgagtaccccatcccatctcatctgccttgctcttcatataccccatcctcaggtggaggagtcttgaattgtacattaattattcccttgattctctttatttttgtcacccatatatagatatatcaataaataatatgtgttcagttttgtttgtttgctattttgttatttagcattccgttgaaatattcattccataattgatggttatttgggttatatcctgtgtcttttctattacaaactatgttcttgtgcacacttgaggaagtttctctaggattcccaggtgtgggatacctgcgtcctccaccttcctaggtaatgcctgtctgtctgtattgcatactctatctgccatggaccagagcctctgcttctcctcacctcattagtacttaccttgtttgatttagaagtctttgcctatctgaagggcttaaatggtatttcattatggttttaatttgcattttctggattacaaatgaggatgaacctgttttcatgcttatgggccatatgcatttcctctattatgaagtacctgttcaagtttcttgcccattttcagagggtagtttatcttttatcttattaatttgtaggcttctttgtgtattttgggaacattttgtcaatttcatgtgtggcaaatatcttgccgaggtcattacttgtcttttaatatttttatttattgtttttggtgtctttagactggcagagctccttaattttttgtagtcaaaatagcaaaacaggttatggtttgccctttttttttttttttttttttttttttttgagacgagtctctctctgttgcccaggctggagtgcagtggtgcgatcttggctcaccgcaagctccgcctcccaggttcacaccattctcctgcctcagcctcccaagtagctggcactacaagcacctgccaccacgcccggctaattttttgtatttttagtagagacggggtttcatcgtgttagccaggatggtctccatctcctgacctcatgatccgcctgccttggcctcccaaagtgctgggattacaggtgtgagccaccacgcccagcctgcactttttgttttaagaaatcttttcttaaaattgaaattatgaagatattttcttatattgttttctaaaagatttatatttttgtgtttcccatgtgtcagtttactcagaattgattttgtgtatggtaagtatctaatttcttttttttttttgcatggataaccatctatgaaaaaatgatttgtatgataccaatccttaaataattgttgagattaattttatggcccaccctaataggtgtgttgttttaatttgaaattccctagtgttttaatttggaattttctaaggatgtttgatgatgtattagttgctagggatgctgtgacaaagtaccacagactgggtggttgaaacacagaaatttattttctcacaatttcggaggctctagaagtctgagatcaaggtgttggcaggtttggtttattctaaggcctttctctatggcttgtagatggccttctatctctggtgttttcatgcggtctttttcactgtgtgtgtgtgtgtgtgtgtgtgtgtgtgtgtgtgtgtgtgtgtgtcccactctcctcataaagacactagtcatgttggattagagcctatccatgtgacctcatttaacttaattacttccaattacatatgacctcattttaccataattatctccaaatatagtcacattctgaaatgccaggaggttaggacttcagcatatgagtttttggggtgcaaaattcagcctgtaacagatgctgactgtcttttcatatatttatttgccatctcttttttgtattttttattgacgtagttgtacatatttttggggtacatgtgataatttgatgcacgtatacaatgtgtaatcattaagtcagggtaattgggatatctatcacctcaaacatcgatcttttctttgtgttgggaatgttataattcttctctcctagctatttttaaatatacttaaatatacaatgttgttacccgtaattttccccctgtgctattgaatactagaacttatcccttctatttaactgcatgtttgtgcccattagccaacctctctttatcccccttcccacccacacacacctcccagcctttgaggctaatcattctactctctaccttcacaagatccactgttttagctcctgcacatgagtgagaacgtgtgatatttgtctttctgtgcctggcgtatttcacttaacctccagttccatccatgttgctgcaagtgacaggatttccttctttttatggtggaataatattccactgtattatgtatatatactatattttctttctccattcatccattggtggacacttaggttgattctatatcttggctgttgggaatcgtgcttcagtaaacatgagagtgcagctatctcttcaatgtactgatttcctttcttttggatatataccagcagtggaattgctggattatatgatagttctatttttagttttttgaagaaactccatcctgtttttccatgatggctgtaactactgcctattcccaacagcatacaacagtgtcccaataacagtgtgctgtatcttctttgatgatgtgcctgttcacatcttctgctcattttaaaattctgtttgctattttcttgttgttctttgtatattttgaataccaaacatgtatcagacatgtgttttgcaactatttcccccagtctgtgacttgtcttttcattctcttaacagtgtatttcacagagcagaagcttttagttttaatgaagtccgagttatcagttttttattttgtgaattgtgctttggtgttttatctaaaagtcatcatcaaacccaagatcactctgatttttgtcctgtgttatcttctaggagttttatagttttgtgtcttataagatctatgatccattttgagttaatttttgggtaagatgtgagggtctgtgtctagatttttttttttcacatgtgaatgtccagttgttcgagtattaggtgttgaaaagactgtcttttttccattgaattgcctttgctcttttttcaaagatcagttgactaatttatattgggctatttctgggctctccgttctgtttcattgatctatttgtctcatcttttgccagtaccacactgtcttgattactgtagctttatagtaattcttcaggttgagtagtgtcaatcctctggttttgatctgcttcttcaatgttgtgttggttattctaggcctttcacctgtgtatataaacttcataatcagtttgtcaatatccataaaataacttgctgggattttaattgggattgcattgactatatagatcaagttgggaagaactgacatgttaatatttagtctttttacctataaacatggactatctctccatttatttatatcttctttgatttcttccatcagagttttatagttttcctcatagagactttgtacatgttttgttagatttatacctatgtatttaattgtttggcattaatgtaagtggtgttgctttcataataatatatatttttttaccttataccaactttcttttggttaagtatttgccgaatatatctttttctgtccattgacttgtaacctttctatgttcttatgtttttagaatatttctatatggcatatagttaggttttcctttttttttttttttgagacggagtcttgctctgtcgcccaggctggagtgcagtggcacgatcttggctcactgcaaactccatctcccgggttcacgccatcctcctgcctcagcctcccgagtagctgggactacaggcacccaccaccacgcccggctaatattttgtatttttagtagagacgggttttcactatgttagccagggtggtcttgatctcctgaccttgtgatctgcccgcctcggcctcccaaagtgctgggattacaggcgtgagccaccgcgcctggcctaggttttacttttttaaaaaaatctgacaatctttcttttaacctgagagtcttactcatttgcatttattgtaattactgatatacactgatgatatttttgttattttatttgttttctattcacttttttgtacttaataagtgatttttatttcttgactttattctggctatattcccaccctctgtttttttttttttttcattctgtttactgcctctacttgtgtagaagttatagtctatgaatatgcttcttagtaattactgtagataatttaacattgatacttggcaaaatctaaagttaatgatttttatcctttctcaataatagaaaatcattagaaactgagttgtccagtctgtattttatttctcctataaatttgatattattgtaatagttttatattgtaatgttactctcatatttcccagtgtctttactcattaaccctcagaatttgtacttgggatcatttttaaaatttcatgtatataaaatttcttttagaaagggtctgttgggtaacaaactctttgtttttgtcttttccaatgataactttactgggtgtagaattttaggtttaaagatattttccccctgcatattgacagtatcgttgtgctgtttttggcttctgtcattgttgatgagacgtcacctgtgagtctaactaattcatattattgtttcactatcatgtctaggtagagatttctttttgtttatcctgtttatcctttttgtttggcattacggatttttctgtatctgggagttgatcaattctttacaattcttatttattataattaaaatagtttctcctttattatttttcttagctccttctgaaagtctgtttagtagtatgttggaccttctcattttctttcccatgcgctctcatatttctcacaacttgtcactctagactatattttggatatctttagacccatcattctgtttcttgattctctcttcagctatgtttattctgctgcttaatccggccataaagttgtaaaattataaaaattgtctttttttcttttttcaaatctgcttgcaagttaccattgcaattctttccccatattttcaaatttttcttttatgtctttaaatatttaaagtattatcttttattttgtgttaaataattcagtatctaaagcctttgtgagtctgattctgccatctgtttctgttgagactaacttatggtttgccttctttccttgtgagatgcttgttttgctcagaattttatatataaaaattctttgaggcctgggttgatgcttccagagaagattgtgtctacctgtgccagttgcctggaggcattgccaacctgggactttaatttatagtctctgcaacatatttttgtattacaagataacatgaatttcattcatggtaacaaattctgaggggagaaaattttgtctcctactgaggattaaggttgacataagtgactttcctttgtcttcatctgaacggtgtttcgttttgtttctcatttcaccttgcactgagagtgagctgttggggatcctcgctttaaccaagaatcttttgtgagaatctccatttggaggccctgggctttattttcttccctgtctcctgtgcagccagtaaggtgaaagcccaggttctctggaattcagcggaaagcctgctggtataagatggtcaattactttggtgcttggaggcctctgatggtttcccttttttgtttttagccactttgaaattgtgccttttgtgtcagctcgatagtattttttaaaaattatagttttaaactaaaattgtgtcaatcaaaagattcattcagcacgtctggtctgccataactggccaggctggaaatcttgtttctttttaataacatctttttaaaaatttacctcttgtgaagtgtttttatttctgttgtattatttggagaggccaacaatcaaaagctctgaagttaattgttcaatgttttataaatgattgtatcttttaaaccattttatctttttcttttttatatgattatcaagattatcatatttgacagtaaaaataatcagctttataaatgtgtaattcaattttatttgatttttaagaaatcttataatgaaattctccaaaagtaatgtcatgctcttcacttattcatctatgtgtatagtttgatcatgaaagtaaagatgaaaatttgttaagaaatctaaactaccgttatattctgtatacttaccttctctgctttcttttctttttttttaatgagataggatctcactctattgcccaggctggtcttgaactcctaagttcaagcagtcttcccactaggcctcccaaagtgctgggattacaggtgtgagccaccatgccagcctgctgttttgaaagaaacatttaatataatagaacatctacagaagaagtgataaaatatcattttaaataaggactgaaagcttatatttttcctctgctaaccccaactttcatatttaggttttaggagaagttttagcacaacttctgcttcttcccaaaaggagattaacagaagaaatgctttttccaagtgagtattaagaagatttagaaaaacacctttcaagatgaacatgatgggattctgtgaagaaagaaaagtggagtgctgtatcttttgcattgcttggtagagttttaacacgtaggagaaaaggtgtgataagtgtattgagaagcgttcttcctccctcctttgcaagcgcaattaaaaatgtcaccagtgactaaaactagtgcactgcatatattttatcttcatagaggtcagaactgttaataaaagttaaaggaatttacatattgtcttttcattaagtagggtggattgcttttaaactctccttaagtaatgagagatttgatttaatattgtcagtgatacatgaaagaaatgtaaggcgtaatcttgcagttattttgaaaaatgctcccaattcctcttaagagtataatgctcaaaaaagcctttttttttgttttgttgcagagagaatgcccttttctctttttcatttttgtttatctccctgagacccacttcactaccccccattggttttctgaagcattttcactttagagcaatatgaggctcttccagactgattgggtttagaggtgctgccagttaatctatgaataataccctgggggaaaaggcttagctgcttagggaagtacacgtgcttgtttaagtaatgggaccctaggagccacgagaaattagagcccagaggctagaacttgatgtcccactgtggataggcaggtcatttgtttaccttctggcatgaaggtattggcaagcttcacagagatctgaaatttcatgggagaaacctggctcatcctgaggactgttaggtactgttgagagggttgggtggggctgtttttctcccttcctcaaaaccatcaccaattttgagaattttgaaggtcttcttgcttgagtagctgaaggagtttaagggcagtcagtttatgctccagtttattgaagatattcaagagttcttaggcagaatggaagaagctgctaagaagaaacacccaggacataaaggattctgaagggggagaggtgtccaaatcagtgtcgagatgttggtgagtggaagaacatgatacagagaagcaagggaaggagaaaacaatctgagccctgggaattatacagcaggtatggttatacacaagacgctctgtagacgtgaggtggaaatatcagtacttccctgttttctctaaaaataaaaaagctttagtaatacttatacaggttaacactagtcccttaaaaatatacttttattgaggatagagaataaacttttttctttttttaatttttttatttttgagacagagtcttgctctgtcacccaggctggagtgcagtggcgtgatctcggctcactgcaagctccgcctcccgggttcacgccattcttctgtctcagcctcccaagcagctgggactacaggcgcccgccaccacacccggctaattttttgtatttttagtagagacgggatttcactgtgttagccaggatggtctcgatctcctgacatcatgatctgcccaccttggcctcccaaagtgttgggattacaggcgtgagccaccgcacccggctgagaataaactttttaaattattaatttatctgtttttactcataaagtgtgcaaccaaaatggtgatcattgttctcagaaacaaaagaaagggtttcaggtgctggcaggcactaggacatttgtccctgctcttaggggtgagggagacagggcagtgctcgatggccttctgccaaggggccagagttgattgtgtgttgtgctgttgttaacctggagacatggtgtgttctgagacacgtgtgttgagaaagtatgtttcttgagattcatcaaactctgctccatgtccttgcttgttcgtatggaaataaatgatactttgagaagaaatgtggataatctagtcagagatgatggacattcttgggtagaaacttgaaggccttggagggcacgtttggcccctgtgagtgaaagcaagctgggagaggagaaggaacagatttttctcgatcacgtatagaaatggtagtgaggaatgcgtttcatcccgaggaagacatggcagaaagggggagggaagcagctctgtcttcagaacactgtatgtccagtgccaagaatgagcttgagattttaccatggtcgtcagagggacctgataggcatgaggcgttgattctccttcactctgcggatgtgtacatcccgcctgggatctgtctcctgtcctgttgttaccaactcacttaactcttctccatgttaccaccagggcctgctcagaaatcctcactgggtcctgtctgtagaatctggctcattggcatggtttggtcagcccaaatttgattgtctttaggcaaaactgataccatccagttggccacaggtctgtcctctcacatcatgtgcttgggtttgttttctgcctgtcccttaaagctttcgaattctcaaacacagaatgaagtccagatttattggcctagcattcgaagacctacacgattggctcttgtgtttccctgacttttttttcatggcaatatcctcacaggtgattgcagttctctaaactgtatgcttttcaggagtataaaaagtaacaaacagtttggccaggcacagtggctcatgcctataatctcaacactttgggaggctgaggtgggaggatcacttgaggtcaggagatcgagatcatcttggccaacatggtgaaagcccctgtctgttaaactacaaaaaattagccaggtgtggtggcttgcacctgtagtcccagctactcaggaggctgaggcaggggaatcacttgaacctgggaggcaggggtttcattgagccaagatcatgccactgcactctatcctggcaacagagtaagactccgtctcaaaaaaaaaaaaaaaatacaaaaattagctgggcatggtggcaggcacctgtaatcccagctacttgcgatgctgaggcaggaggatcacttgaacctggggggcagaggttgcagtgagcctagattgctccactgcattccagcctgggtgacagcaagactctgtttcaaaaaaaaaaagtaatatatatatttttctcagatgacgatctctgcgtttccttttctgtgtgcctatctttcaagctggcagaaatgtcatttccccactaatgtgtctttcttgaggctttaagggagaagagacgtcttcctcttagctgattctgtactgtatacagtctttattgtagtatttataacattttactgattattatgtacaaatacctagaacatagccccatgcctgccatttcataggtggccaataaatatttttgaatgagtaaacagagctctcaaacataccataattctaagtgtctcaattctctggcttttgagctttgacataccttgaatcaaataaatcattcttattagaacgttaagtgtttacccaacccattaatttttggtttagatgttgaatccattatttacttgtttctttaaaagcttttttgtttatgaaagttgtacaatatttgaaaaatgaagaaaaaccaaatgcaaaaaggtcatctgtaattttgttacctagatgagattatcactgttagcatttggtatacacttttccaattgttttcctaatgcatgtgtctgaatttttttttttttttgagacagagtttcgctcttgttgcccaagctggagtgcaatggtgtgatcttggtcactgcaacctctgcctcctgggtttaagtgattctcctgcctcagcctcctgagtagccaggattacaggctcataccaccatgcctagctaattttttgtatttttagtagaaacggggtttcaccatgttagccaggctggtctcgaattcctgacctcaggtgatccacctgcctcagcctcccaaaattcagggattacaggtgtgcaccactgtgcctggccatgtgtctgaatttttaagcaaagggagatgaatcatattccatatgcccatttcaaagctttcccctgtatatcgtgctcatattcccatattgtttaatagcttccttcagcgtgacttttgcaatgtttttaaagactgtgctgtgatacgaaaacatttttatggcacaataataaatgaaaaaaatcagaatttaactagtaatagatgccagacttctaaaacatgtattgaactctcctcttccttactcccttcccaatacttcctatctctttctctgcatatatgtgtgtgtgagtgtgtttttcaatatttatttatttatttgacagagtcttgctctgtcgcccaggctggagagcagtggcactatctcagctcactgaaacctctgcctcccgagttcaagcgattatcatgcctcagcctctcgagtagctgggattacaggcacctgccactgtgcccttctaagttttgtattttttgtacagccagggtttcaccatgctggccaggctggtctgaaactcctggccttaagtgatctgcctgcctcagcctccccaggtgctgggattataggcatgagccactgcgcccagcctctttttttcagtttatgcattaaaggtctttatttgcagtttattttaatatagaggagtggtgagagtcatatcctttttctcagctaatttttacagcactcctgattcaatgttccctcctttttcactgctttgaagttttactttttaatcacatgtaaaataattatgtctatttttcatttttctagaatatgttttctatgtcatttaaaactacattcttacgacagagccacattgttttaactattttaactttataatttaacctaatggcggcgtaaaccttgcctcattatttttcagccttttcttaattgccagtacccattctgtttgtgaagagagcctggcctttgtgcttatacagccatggatctgagcctcatctttgctcttttcatctctctgaccttaggcacatagcttagtttttctgaacctcagattcttcttccattataaggaggtaataatcccatcttccctggtttgggtgagatcgaaagagataacgtatgtgaagtgttaggtacctagtaagtgttcaggaaatgatagctattgtcatcattcctatgaaaattacagtaattttgtcaggttacaaaaaacatccatttggggagaattaacctatatacatttctctttagtaacagagctcttccatgtatgttcttcagtaaagatgtatgctttttcttataggtattacatgtttctttattaaatttattattgtatttgtgcatttgacatgtaaataatttaagactattttctaattagaattctatcacttactggcagatgtggcttagaataaatctctgagcctcagttttcctatccattaaaattagtcatcttcctttcttatagagtggttaataggaacaaatgagacattgtgtgtgacagtgtattaaaaatatagaaagtgaaatgaaatatgaaataagtaagacccagattctgttcacaacaagatcctgtgtagtgttagtaacaagttctgtgttgaatatcctgtggggtagggagaggggtttcttttggaggagaggtggcatgggatagaggatggaaggcaccaggtagttttgatggtttctttctggccgttttagaaggtctcagctcagggagcgacaagaccctggtcatgtttctattgtgggtgaatatcagggtcaagctacttgcagtggacagtgcaggcagctctggggcaatatagccttgaggccttggatgagtgcactggggagtcccatgcctcattatcaggttgtggtggtggtgagtgctaggagacgttcttgcacactgtaaggaatgttatgttgtagggagaaggagaggcagctgctcaaggcacctcagaccctcgttagtgttagtggctgggagggtgctaaacctttaaccgtaactggagttcatacatagaacatacatacatatgtgtatagatatttccaaagttgtagatttacagtttttaaaatttgtttgcatatgaaaaaatattttttaaagtgaacaaaaaataatttaaatttactacactgtcaaaatactagattctttttgctttatttgataatattgatagcaattaaaacagccaaaatactagattctttttgcgttatttgataatactggtagaaattaattaggtataagtgtattttttctaattgctattttactgaaagcatatatatgtatgtgtgtgtgtgtgtgtgtgtacacatgtatatatatatatatggcaaatgaaatcttaaatccagaatggggtagtcttaaaatagcgcaaaagacaaaaacttttaaaatgttaaacagaagtacagttgaactttgagtaatgagtgcaggggttaggagtgccatcccctgcttgcctgcaacagttgaaaatcagtgtgtaactttggactcccccaaaacttaactactgatagcctattgttgactggaagccttacctataacataaacagctgattaatacatattttgtatgttacatatagtatgtactgtatttttactataaagagaaaaaaatgttaaagtcatagggaaaatatatttactattcctgaaatagaagcggatcatcataaagatcttcttcttcattgtcctcactttgtgcaggctgaggagaaggaggaagagaaggggttggtcttgttgtcccaggtggcggaggtggaagaaacttctgtgtatgcgtggacccacgtacttcaaacctgtgtagttcatgggtcaactgtatactctaaaactgctatttaaaatttaaaaatcaagttgtgaccataaagtattctcttttgggaactgagtgaatgaattctgaatctggcagtggaaatgaatatgatgcattgcattacgtggcttcagcactaaataatttttcccacttttcccttccgcacagatcgaaagctgctttgcgtcgcagttggagcagcacccccaccgcaggtggcattgaagggagcgtgaagctgcacgaggggtctcaggtcctgctcacgagctccaatgagatgggtactgttaggtatgtgggccccactgactttgcttcaggtatctggcttggacttgagctccgaagcgccaagggaaaaaatgatgggtcagtgggtgacaagcgctatttcacctgtaagccgaaccatggagtcttagttcgaccgagcagagtgacctatcggggaattaatgggtcaaaacttgtggatgagaattgttaagcttctaaaatattaaataagctcaaatatatatatttggtgtaaataaagagtccatggtaaatggtttactttatttagccatattaaaattttgaaaatatagttatcttcttaaaaaccattataacaattcagagagagttctttacaaagccatgaatatgaactatggggaatcatggttcttttaaagcaattttcaaaataagtaccaattaaagctttaggttccaagaagattctgggactcaggaagaaaaagtgccatcaggtgaccagctgttgcatttcttgcttattctgttttgtttttgcacatcataatggatttttcttagtgccctaattgtgaagggtttctctagctttggttatgtgtaatgttcacgtgacctttttttgtcaatcatttttggaatttttctttctttctgtgctttattactaataagtccaatgagtgagtagtagctagatgactagtatgtagttttatattttggtaaaattatttgccctttcagaaatgcctcatctaaagatacatgataattttggagttggaaggggccttagaggctctccagctctgcttcttgcccattgccaaatactgaaatggaagcccgtcttacctggggtcactaactggttggttaactgagctaagaatagactgtgggtctcctcacttgtggcccagtgctctttctgctatacaaaatgtctaatctcagatttttcttctgctgcttgactgcttcatctggatgaactacaaaaaacccatgattaaggtttatgaattcaagtaataattagattttttttgcacagacttacttaacttccttattggatatgtttgtaacacataaacacaaagcacttttcaaacatgatgcacttttatctttgtgaataatttactgtcctttcctcctgggatatgagaaacattttaaaaaacgtatttaacagaagagagcaaataaagatatatcaggaaggatgtattagttatttacttaaatgtttataatatctggattttttttgttttgttactcatagaactggtgttgtttgctgtttttatttctctaattgttgcagagttctgcctgttacaaagctacagaactgtattgtttttattttccttcttgagcacatgttaacaaactaagcttcacattagagtgatgtcataatgtaaaatgtttgcattgtggttaggtattgaagtttatgtcctgtctgtgtaaagattcatcttttattgtaaatatttagactttaccacagaaatattggaacagtttgctttataagattaaaaagcatccttcagaatggagcttgccttgtgcttagaaataatatgttgaactattttgcaatatactattttaaatctaaattctgtcacttcgctgcctttttaaaatagtgtggtatttcaaatattgctagagctattttcctgaaatacatttgcaaaataaggctgctttgtaatcaaggaatatttttattgattgaaggaaatgactgtactgcgattcaaaagtaaacttattttattatacagattatttcttaaaaactctatttataccttaacatgaaatccatgaccacaccaaacttggttattcataatttttcctgttaaatataaaacactgtaagttaaaaacagtaatgccaacattgaatttatttttgaggtcaaagaaccagttgttctctttatatttagatgaggatgattgagtccatatactatgtatgtttacatatactatacatgcacattaggtgttttcatttgtgttttgcttatgaaatgtcatttaaagttcacttcttgagcatcaataaaaagggaagctgtgtggttttggaatggtatcttgtcatttaccctatttgcaactctgcttttctcagtaactcagggtgcatatgctttgaactttttcctcacggtaatggcttggatttgtcctgtccctataaagagtattaaaaagtatcatgctttctactcaacagtctatgttcatagccaccatcctattagtattgttttgatgaatagtgagtcatttaagaaaagaacgtatttctacagttgggatttcacttgtttatttagggtaggatggaacactttgaatttagattaaaaaatagaaataattagctgccttttactaaaaaactttgtttttatatttagggtgatttggggggaatatttttaagtatgtaagaatgttgagtactgctgtttgctaactgtgaactctggtgttgtaatcttgttgtgagtctctggcacctcctcccaagagctccttgtttccctctcatgttttatttttctctttagcatttggtcatgcttattactgattacaacttcttgcttattatttctttcttccttcacgagattgaggagtggatttttgactgttttgttcaccactttatccccaacacctagaataatacttggtacctagtagatgctcggttttgttgagtgaacaaaggcagtaaaggccattgattgttggaaatagagatagtatctagctagcttcacacaaggggccttgcaagactaggccacagaacaggtaaattttcttagacacgaaaggaggaaggaggacaagaaaagtttgaatccaggagcccaacttacccctgaagagtgccgtgtaagagacaacagatgctgagtggcgcagcagtagggaatggggaggaaagacgcagcaggaccacctggggcagctccctttcccttctgcctggggctaactttgaattcctattttaatatgatgataatttagagaatatggtaatacatgtggtctaatatggagagaatgaactggatcatactcaagtggggataacgttgatctccagtattaaatatatatctctatctatctatatatatattttttgaggcagggcctcgctctgtcacccaggctgtaatgcagtggcgggatctcggcttactgcaacctccgcctcctgggttcaagtgattctcctgcctcagcctcccgagtagctgggattacaggcacccaccaccatgcccagctaattttttgtatttttagtagagatgaagtttcaccatgttggccaggctagtcacgaactccagacctcaggtgatccacctgccttggcctcccaaagtgctgagattacaggtgtgatccaccgtgcctggctgtgttagatatttttatttcagagttttattttgaggctccctttttagaatgtgtgataatattatttaaaccacatcaaccaatggctagaagcctattgtgttaaaatcattcttaattgagaaatagttctagtaattttaactacttaccagatggatatttgttatctaagtaacaaatgactaaatgactcagagacatataatattcatagccacattgcaagccaatagaaggattaatttatttttttcatgccctttccttcacttatttataatacaaatacagtggttaatacaaaactcacgttatcgtgtatatttttagtaattgtttagtatcccttggtacacaggccttatttacaaacaatgtcacatatactgtttgattataaaataaacattcctaatgaaatttgtgtatgggctgaacaagttaagctttcaggacatgttaatagtgtattataagcagaatatgatgcctttgcataggcaaaaagattttgttctaccatattttttttgctaattctcctttttatgagaggaaaagtatacgtggtggaatttgagtagacgagcacatattactgacattaatatcgtttcattatgtgtggtcaaatgaaactttttgttttatagctctcccttgagagcagcctcaaggtgtaagagaagctttttccgtttatctttttagaatgtcttccagtgaatagaatgttcatgacaataaatcagcagcaaatttcatcatttactatacctttcaaatagggcaagcgtagtcgtcatggtggtgctgagaaggggcagggcattctgaattattaaagatatttcaggtgtttaaattgaggctgttagctgaaaacataatctgttcccaaggatcactggtgtcattttttaaatgctcataaatctggtttaaattcggctctaaaatctcacatgaacccagatatgtgagtttgttgctaccgtaaccccaatagactcctgtgtcaggagaaatttggtctcaggattagatatgtagtcagagttgtttcaactggctacataaaatccaactgggatcagttgaactgagcaagctaactatcctgtactgaatttgaattttaggcatttctaaagcatggaaggtttaaccatccaagtgctgtgttcttggcctgtgtccatctggtggaggttaagttctttcagttccagcccttcatgactttattccacgtagacagacttaccttattgaagactgaactaattattatttttcacctaacaaatcaaatcagactgacatggagatgaatcaggttaagattatatgcacagcttcaagccatgcgttttgttcttttctctagtatgacttctgagattcagcttgaaactcagtcaacagtgttaatgacattggctgcccctgacagttcttgtcgtgaagggtgggtgttactatccagtatctttggggggaaaaacccctataatggatttttaaatgaattttaatagtcataaaaagtcttgtattgatggcaaggggaagcggattttgcattacagacaatatagagcattacagagcagaagaataaagcgaaaaattatagtcacctttattgaacctgctaatacaaatggatttctaataagaattccaatacattacatatattagtgaaaatactgtaatttttcagatgatattttctctttcttgaagggaatagagcttagggaattaagaaatagcatgagattcttgaggcctcactttacaccccctggtgtgtgacaaaagaaaatccagtgtaattttctgctttagtttcttatcctttataaaacatcaccagctgtttcctggtacgtacttgaggaaaaagaatttctatcttgaaaattactttatttcttctgagaactgtgaaatactatataaatattactttgagaataatgcaaaaagatttaaattgtttcttttctcaactattagatgcagtaaaatataggaaatttgcccacagtcgtcacaatcttatcttggtggattgtttgaattggctatatttttggattccctgtttctagggatccattataaagctatatggttcacaacagatctccaaaaattgccatccaatggcagtggatagctctataaaacctgaagagaggggttctatccaattctatggtgattgtgagagaagactcctgttcctcatgaattgcccatcataatggcacttggatgcgcttgttgaggagcgtcagaatccacaggcatctcctgctctcaaacacctggcctgctttaggctttgccacctcactttgggaatgggcaccgatgtggtttggctgtgtccccacccaaatctcatcttgaattgtagcttctatcatccccatgtgtcacgggagggacctggtgggaggtaactgaatcatgggggtaggttttcccatggtgttctcatgatagtgagtaagtctcatgagatctgatagttttataaagggcagttcccctgcacacacactcttgcttgccgccatgtaagacatgcctttgctcctcctttgccttccaccatgattgtgaggcctccccagccatgtggaactgtgagttcattaaacctctctttctttataaattactcagtctcaggtatgtcttcatcagcagtgtgagaacagactaatacaggcactaagaggtgcaaattgtcaactgacaaaaagaaagtgcatcagatataccatcaaatattaggtgtgataaaagataagttttatggttttactttgctaataaggttcccattatagcaaatgtaatgaaagagaaataagtgatgtggcactgaaagcatgaaagtcattaaatggacatgactcatagttctgccggctttgctgctttctggaaatcatccctgattaatctcgttttgctatggtaaggatttgatgatttgttaaagagatctttgaatagaaagatctttgaataaacaggactgatactaaactctctggtctacttctacataaagattacatatgatttgtctcactgggataagagttaaggtcaaggacacatgcacacaccagtgatgctccactgataatgactgggtgttggaatttaccttacacaggtgaagtcctacagaatcatggacttgacagttagaaggggcctttgagaccaaagccttctatatatatctctatgtatatagaagatggagtcttgcactgtcacccaggctggagtgcagtggcgtgatctccacttactgcaacctccgcctcctgggttcaagcgattctcctgcctcaccctcccgagtagctgggattacaggcacctgccaccatgcctggctaattttttgtatttttagtacagatggggtttcactatgttggccaggctggtcttgaactcctgacctcgttttttaaataaaatgagagtttcagtaacttgcttgagtcagggaggtagtaattgcagtctagtagtggtaggtctcttaactcctgcctggtctgcttgctgttttctcaagtaattgatgaatgctaaaccatccgagatgatataatcatctgaagttttatcaatttgatattcatctatgttagcaaatacctcttctaatatgtaaatattgtagggagaaatactaccctagctgctaaggtttcaatgtgagtttgtttaataagactgtctttcacctaacaccagctgaaatgaacattgagtgatggaggaaaaataactgtgggttagttctcacaaggaggcaataagtcttaggaaattgatgggatggggagagagcccgaggatgtcaagaagagggatataagaaatggacatgtgaaggcactaaagactaattttggtatttgtgctttttctgaggttagacttgtagtgccatctttccatgtcaagggtaacacacctgttttacacttactgcatgctgaagagaggaaggtgattcctgtagttttgtggtcatagttcatgtaacttcccgtcccccgcaccccccgtatagtagtttgttcttaccaagtttttcaaatgttttacagttgttaggctacggctaaaaaatgttttgcacctgagtagtgcatcaaaaattaaacacccccattcaggacaccaaatgaaagtagaatcttaatagaagccttactatttgctctcagtaatgatcttgtattttacagcagcatgtttaggattacgggaatgctggttttgctttttcatgcaacaacacaggagccatctgctgcaatgaaattagcaaagtcaaattgtgtgttctttagggactcattttaaaaaccattaaagacagattgacaacacacttcatacaa

SEQ ID NO: 120 - DNA, 136580 bp, Homo sapiens
cccccgctccccgccccccaagccttagtgagattgacagtcgcgtggaggaggcttttccaggcacagcctttctcatggtaatcagcccccggcatcacctcccggccgcggctgcgcccgctcggagcgcggctcgcggaccccggggaccggaaacagggcggcgggcggggagcaggcgagcgagccaggtcagctgaccgggcggcgggcgggggtcgcaggatcccgggcggggacaggtctgggggagggcggtctggtgggagggggccgaacaccgcccccccccgcgacgcgctcctccgcctgtgcagcggggcccttcctggagatcaaatgcagggaccgaagctggcggcgggggttggggcggggtgtgtgggggggggagtggcagagcgcgcggaaaattggggacaacaaccagacctgtttagcatcaataaattaagatgctcatttgggtcctgaagtttgctggttcctgtcagtggagacgttggcaaaagccctgaagccgagattcagcctttacttcaaaaaaataaaataaaatcaacccctcagctggccgccctgctggggccaggtgacgtgcgagattccacagcctgcgggtctcgcagcagggatgttagggacggtctgagcttctctggtcctgttttggttttgtttgaaagggcttctcagagagatgctcctgattttttttttttttaatagactttcccctcctatcctaggctcaactccgaatggattggattgcgagtctgcacgtgagaaaaccgtttggcttggcttggacccctgccgccccccacctcctccacacacacccagtccaggggtcccctttatcaccctttgcttgcaactccaaaagaagttgcccacctcctgagtcacaacacaaggtcgaataattcctctagatgaaagatcagtttcatttcaaaacgagaataggttcctttttttattttctccacatggtacaaaataaacagaatttgctttaaaaaaaatcattagctgtggccaaattcgaattccttctacagcctgtgtgttcaagggcagaaacattgtatctcttcgggcatctgggccgccaagctgagcggggggaggggggagcggctgtgaaagttgaggaaattgacagactgagaggtgaatggggggacaggcaccaggtcctggctggagggaattggaaaacaaaagtgcatccttctcaccctgcctgggtggagggaatcctgagggaggtagtttgttttgcccatggaaaccccaaagaattatttttcccccttcaatgttgattgcaatattatttcacatttccgtgtatctgttgttttaatctctttcgtctgcgctaatctcgaagtggattattaatggggaagacagagaaggagagattcatttgcaggacttattttgctgtgtgaggagccgaaagccagcagcccccagtcctctctcgacttttctctgcgtcctgtgctcctgcatcctcctgatcccacgatccccattgtccccgaactggccctcggactgagggagtgttcggaacaaatttatattccggcttcctcccgaccccatcacctctgccacgttgggaactctctcggccaaatgcctggggaggggcgtgccagtcaggaaccaggggcaaggcaacctagccgcagcgctcacccctcgcggagacccttcccgtgccaccatccaaatatctaccttcatgggaacctggaagactgctttttcaccccaaatcaaatactggctagtcggaactcccagtgataaatgttggggactgcctcctgccacttgagcaattcctgagtccagggtaatcagatgattaggtgtttttaatggaaatacttagggtttttttttttttttttaagtcagatcctaagtaacctgacatttaatatacataataaagacaagtgttttgttagctattcgattggatcctttgacctgaggttatgcttgtgtgtgtgtctggtctgtaagcctccaatggctacctgggtgcctgaagaggagtcttgcctgtaataactctatgcaaagggctccttcttccttaggagtggtggaagggtggctgtaaagcaaacgtctagagaaagctggattccaatcttttaaattaaaaaagaggaaaaaaaggaagaggaagaaaaatggacatgaacagtggtgctaaatctcagaagaggaacttgataagtcacacatatatttagtatagatatataataatgaaagaaatgtaaaatataaaattaagaatgtgcctgacccatgttgaaaatctttgattttatttattaataatttttaagctgaagatcctgaatgcctttcttctatagacactttatctgtgatggggtggggggagagagttaatttatccagcagctattttcattataataaatacttaaattaggaaagaggtgagtaaccaactgtgaaaatctactttcttgcatcctagaacaagatctagctgtggtcgtgctaggtagctattaaccacccccaccccactcccccgccccgcaaaaaaaaatacaaaatacaaagacgtatacctctgggagtgtggatgtggcaacccatgtggtggcttgtccctcctttgagtgcaattgccagtgactcttgcattcaaagtcttgctttaggcacacattcaaagcacagttcaaagcagtttatcttaatatagtgttggatcagggtattatttgtttcagatttcatcagactggaaacaggagggtgtaacatatttaacaatattaaagcttaaaaattggtgtgaggcagctctctggtcctcttaacacctccacctttacctttccgaagaatcctaaatgctgtgaggctagaagtttatttgtgctctgaggttctcaagcactttcactctttaggaaaaaaaaaaaagtctcacagttatttaagaaattgagcctgaaccatccgaggataggagatttcttccttttccgataaatgcctgtgctcagcatcctcaaatttggctgtctttatttacttctatattagttccaattatgtgcagtgtaaaccagctttttgattaacaaaacagcagagcattggttaagaacacttaaacttcaaaaaaattcccctgggaagtgggctctgaattggttaataatgtgcagtacttgctaaattgctgacttccagatgtggaaaatatctttcttgtttaggacctatgtaacctgattggattacgacagaagcgtcacgttggaagcttttgagtgattatttaattaaccatacagtagaaagctgtattctccaggaaatcccttccatatttgcataaccaatcccttcagagcaaaggtggagtcttttctttttaatcttactttaattgtaatatcaaaaaatatatactccaaaacttagaccccatgccgtttaatatcatgctctcccttccctgctaagtttctctatggcctttctcgtttctcctcctgcctccctacacactctcccttactttgtagtgaggtctccccgaggtgtagagagattcagagatcggccaaccgagtgttctattttaatttacttagagaccctttattaaaatgccaaactactttttaatattgggatccagtccagaaattcatcatgcacacaccctaatacacatgccctaagatgcagctcccatgcagcatttttttttctggctctggtacctaaaaagaaaaaaataacaataagagaaagggcagagaactttgttccagaagctgtactgagatacctacacaatttgatgtgcatctcaaatctggtcattagagatatctgtataagaagagactatctggattgaggacccgggatctttccctttaactttcgccccttggagttctccagttctgtgaatggtgtgcaccgttttccgccctgtactctgtaggatttagtgatgaggataatgatgccaaaggcttgacgggcggggaggggggggtggagggggggagaagggagggaggggggagggaggcgaaggcgaaagggagggagaggaggaagggagggaggtggaatttcatttcttccactaaagcgtttgcggagacttcaaggtataatctatcccagatcctttcccagagagaaacttggcgatcacgttttcacatgatgctcacgctcagggcgcttcaattatccctccccacaaagataggtggcgcgtgtttcagggtctctcgtctctctcctacagaaaagaaaaagaaaaaaatgtcattagaagaggcgtaacacgtcagtccgtccccaggtttgtgtttcctggagtggccgaaagagatcagttctaacctgctctgcaggaataacggtcctgcctcccgacactcttggcgaggtttttgtacagtttgctccgggagctgtttcttcgcttccacctttttctcccccacacttcgcggcttcttcatgctttttcttctcaccatttctggccaaaactacaaacaagacttcgcaggtaggttttttttcctccccttttctctctttttatccctttttggtgtgctcgtcctccatcctccttttctaattttctcattttgagtggggatgtgagtctgaagtgagaaggggtgtccgtgggtaggaatttcaggtgggtttagctcctttatggcaagcttttctcaagagtggcttcttcgctttctcttacactcacactctctctccttgcttttctctcctttttccctcccccaaataatttcccctgtacctgttcattcaggtaaccaaaggtgtcctttgctatccagcccaggaaaagttttattgagaattatatggctggaataaaaactcatcaaggggagaggtcctgctctattttcgcatctagttccaattcattatattcagcaattaggacttggcaaatacctgttaataattacaaaacttggtcagttacagacctacaaattcgggggcaagtctttctcttagacatggcagttcatcctctcccaccgagaaggctgttttctaagcagaaagttgtctgtttttgtctgcttagcgagtttcatttctttatttcattctttgtgtgtgtatgtgtgtgaagtaacacctcacttctgtgattataaataaagaagtgaaagtcctcatggaacttgagtcgtttaccaaagtggaggggggggcactacagctgggaagaaaactgctgtcaggatatcagggttttaaattaggataacttttaaaattgtatttttagtggcaaagtaatatagacatggatttaatagaagacacatacacacatatatcccattccatactttggcactgaaaagtcgagagagagatagcaggagttcccaggaacagtgatgagcccggctaacatgaatgtgtttatctcccacctactgatatattttacatgctccccctgtaatgatgaaggcaagattactaactccagacttaggagtaacaggcaaagataaagtttacagcacaaatgccctgtctctctctctcacacacacacatgcccataaaactagcaacttactttattaaacatgtatttatatgcagtcgtgtgtctcaggatgaatatagacaggccagctgtttcatcccagacacttgtgtgaccatttctttatttcaggatttcccctaacaatttcaaatcaataggacaaggaaagaaatgataaaatatgtcaaacttaaaagtctcctactatgtatgcctaggtaaatttaaggtgctttctaaaatatccacttccccttctctctgcccccctcccttcacccctctcagcaaatgtgtggaaactgatactcactttccaggttttctgcaaagcttctagcacaggagacaataggtgtggggcgtggggactgagtgtgcccggcagagaaagggttaatggcccttgtgttacagtttgcatctgttacatcttttatagccccctgtttaaactaatcctcgaggcacagcatcttcccaacctccaccgagttttcaggattctcctcctctcctgcctgcctccgaggtcccccttctccaagttttgacagtttcaactgaaaaaatgcagcgcctctctcgatttttaggtacaaaagtttcgaagccagaaaggatacgatcatttagtagagcttaaaagtattgccgtagtggttggactttctctttcctttcttaagggaaaaaaaaaattctactggaactatttaagggaaccagtgtgggggagcatgtgtgtgagtgaggtggggggaaatacttaagtaaatattgtcaaagtggcgagggggggtggggtaaaggacagtgtccaaagaggcttataattatatttatcattgcggcgtaaaacgggaaatcttaatttgggggcgagggtggggggaggaagagacagtgcctcgataaactccaaaaggggaggggagggggcgctgggcgagtgggcttcctataattactattatcaatttgcccgagtgtgcttcatccaggggctgtttcgcgttgtttgtttgtttgtttcctctgggaattggggggtggggggatgagaaaagatgagaacgaaaagaaaacctcgcctcaccccaagttcccgagccgggggctgaggacttttcgaaggaaagggtccgcctagccctgagtcaagcggtcttactgtaccgccgtgtgcattccctcatacggtcaggagttatgactcattttgaagatgtaattcttgtctctctgatcccctcgcgggtgcaacacaccaaacagtaacaaacacaaagcgcctcggggccaaggctgggggtggggggcggggagggggccgccgaagtttcgctttggcgttggggggcgcggatgggtgctcgccggggccctggcccggctcccctgggcggcccgcgcgcgtttcaatgggcgcgggcgatgcccacattgtcgctgtgtttggttgctagatcgagcctgcgtgctgccgaagcagggcgccgagtccatgcgaactgccatctgatccgctcttatcaatgaagcagccgatcatggcggatggcccccggtgcaagaggcgcaaacaagccaatcccaggaggaaaaacggtaagaagcagcccgaaccaaacttttccgggccactacgcggctcgagacccagggagaaggagggggaaagggaaaaggaaccgaggcggcggcggcggcggcgcccagggctctagggcgagcctccctccgcggccggcgccggagcccggcgcgcgcggcggctggaccggggggtgttggggaagtgccgggcaaagtgagcgtcaggcacccgggggtccgagcgcgggggtccggccggggccccgcgcccccagccccgctgcccccctcgagcccctgcctccgccctccctccgcctccgcctcccgctccgctcgcgcccggcccgccgggtctccggccgggcttcgggagcgtccgcctggggcagggcgggggcccaggcgctggatcgcgcaggatcccggggcgggggcgggggtggcagagagactgcgaaggcaggagaggggaaccgggtctgcgcctcagcgaggcttaaagtttcttgccggagtcgcccggccgcttctcggtgcgccaagtaacggtccgcgggcagcggggcccggcccatcgcgcccagaccccggggtgggagggagtcggccggccccgcgcggggtccggtggggtcgatgatggctcggggacggatgactcctctccagcaggctctgcccccaggccggggactgaaggagtcgcagggcgcagcgagacttttcccggcagtttctacatggtctggaggagcccgttatccaggctgagtcaggaaggaggaaggagaaaggagatgggggttcgaggggcacacgcagatcagaggtgggatattaaaggggggggtgagagtttggtaggtccgttttggagacagccagagaagggacgcggggggacagagagaaacagagagagaggaagagagtgagagagagaccccctaggtattaccccaaacaaaatcgtgggaataaaagagaaaagtgattggcaagagcgcggaaggcgcctgggggaggggagagggctggggactagcgagggtgccgggggggggtgggggagctgacggaggataactgagtttaaaaagaaagaaaccaacccccgaaaacaaacaagcgaacgagcgccagcccagactcggaaaggaaacttctcgctcccctcgctctcagcccgatcacccggcgcggggccgcgtagacgctcccgaggcaggcgctgggacgcagcgcccacccggcctcccggcctccgcagccccagcccgcgcctcgcggggaccgcccgggcccacttggagcaactttcctctagagaagacaattgtgcgcgcccccggcctgccccagagctgcgcggcgcggggagggggcggctgggggcgcagtgtgaggtgctggaaggagcaaaacacaaagacgagagaattttgattagagacaaatgatgcttttctctctctctctctctctctctaggttttgtgtgtgtgtacgcgtgtgtgtgcgtgtgtgtgtcttttgcttgttgtggtggaggtgtcgagccatatgggggagtgatagaggaattttagtcagaaactgttcgttacgttatcctgcctttcccctttgtgctgtctttgatctatttgcttggcttagtattacagaaaaacaagtacaataatatattccgagctgcttccccaagattcagttcaggctgcttctttttaagtctctccctctctctttctccctctctctctctcttaatttaatttttttttcactctggtgtctggcattatttaaggtggtccttacacaggagacctccccttccccatctctgagtaatttagtagacactaaaattacacctaatgtccccctctcctctcttgtgtttcctctgttccttttattaaatgttggttattgattttctaaaatcaatgtctgttgtggggcttttttccccctcttacaagtatctaaagcacgttgctgatcaactggataacaaaagctttgtgtcaaggaggcttttttccctcttctgttaaacagtcattttttttttttgagagaaaaagagaatgagatttaaaacaaggctcccagaagtgttcttttgcagggaagactatttaaagtgtgcatttcttcttgccttcctccttccacctccttcgggattttgccaccgttgaccagcctggccctagcagtgaggtcaggccagagcccaggtctaaggaaatagagggatcctggcttcctgggaacccctaggagacctggcagagagggaggcccgttgggcgcttcgcaggtggaatggagtgccagagatgtccgcagtcatggacactgcaagtatttcccctccacccagccactaacttgggagaagcctccacattcagaagtggaaagttgaattgcacattttaaggcatttagcccagatcctgcacacttaatatcaagcctgtccattgcttacagcttctctaactttgactgttacctgtctttttttccaaataagctgtgggaaaacatgctgtatactggttattgtaagtgtttttcactgggtttaatctgaccgagcaatgttctggttttgagaagcaggtagaagagtactaccaccccacccctttttcattttctttctcatcaaacacatatccaatgcctttccctttgggaattgctaggatttatctgaactgagtggatttttcttctttcctggattcatggaaaagatgtcacttttgagcttgtgtctttgctgataacactaaatatgatgatgcttatcaaaatcatatagaaattcctggaaagaaataatggcaataataatcgtataagtagaagctggaagggaaaaaaagatggtcatccaggaacctagaatggcactttatataattttaatgaagtcaacagtgtatatatagactaaggcgacaaggagataaaacgtgtaaagcagtgtgtgtgttttaaaggctggtcaagaacgtgagttagaagacaatgctatgtacatttaataaaaagcaaaggagaaggaggcagttgaagaaaaataaatgtacaaagagagaaacaagtatctgaaatacaaccttccagattctcaggctagcaagatgcctggcagaggcagtgccagggccaagttaacccatagcgggcagtcagtctcctttcccccacatggaaaggatgaaatctcttcccagaaaataagatgtgcaggaggaaagagggagtggggtgagggggaaggaggcaaaaagcgagttgcccgcagacaagaatgtgtgtcggtttcaagaaagttcagtcagatgatcctcagtcgcctgactcactttgtaacactttcactgacgctggagaggagggggaaaacccagcccccctttttctttcccctgattataccccactatctccacacagccttggagtcagaaatgagcactcggagcgggagatgccctgctgctgcttgccaccggtgcggcccgtttgtaacttgcaaagtttgttgcttttgcccctgattcgggcagcgggtcctgggatgctcctgcttccctcctgcctcccacggagcccgggaagagggtctgcctccccatcccgccaccttccagcatcagcctctgaaaaatctcacagagacatgcacgttgtagcaaaaatcaaatccggaaactgcttgtttcagagaaagaaatgaagttgtcttttaaagaaaaactgaattaggaggagagaaaagggaaataggagaagaaaggaaaagttaaatttgatttttctccagagtttccactaaagggttggggacagtgtgaaggagaaggggagctttttacaaatgcctttggtctctgaacttcagtggcaaagaacagggatcaagttgaatgttctcagggctttggatcctagaggagaaacaatcagaagagcagaaatggttatccctgtttaaaataagccctcactctttaccacttccttaaaggagtggaggtgctggtagtgatggttagaggcaatgagggacggagaagttgctcccgtttcagagatgcttaaatgaaaaggaaagaaaatgcagtcaaccccttctccaggaggtgcctcctagctctcctccctgagaggtgaagttgggatggggcaacgagagtcatacacacttagacaaggaagtttccttcggatcactgtcagtccagacttggttatctttgcaaagtgtggaaatctttggcaagtagctttcttcgtaaagttgatgagcttctagggagcctgttttgctgactttcaaagcactggggcaggttgtgtggcaggtaccagttctgagggcgctccaaagatatccatctccatccttttttctctgtggagatcttctgcaagttttgtcacgctgcacacacacaaggctgggggctatgtatctaggctgatctatttgttttattttggtctggaaaaactaagccaattggggtagaaacatgctttccttcgtagcagagccagtaggctgctggtgtccatagagtgacagtccaccaggactaagggtgggctgaggattttaaactttacattgtttctctgttaccagatacaaataaattcacgtcttccaccatttgttttcaaatagggtaaaaccaagattaaagttccctgctcaactgctatgtcataggtttcagtgtttcccttccttcttaatttgcttaaagaaaattccaagaggttattaaagaccttgatgccatattaagaatatttcctgggaaaaatgtatgtctaccctgaaggtaggaaaggagggcgttgctagcctctagcagtgccgcgtttattctaagatgtgggagattcttttccttgcaacagtttttgtcatctgcattcttccaaggcttttaaggtgcattttcttctgtgtgaaaggaaattctttgtccttttcctctcagcaccgtggcttcccaaggtagacactattttgtgcctgtcacagagagagggagtgcaggtttgcaatgctcacagacaattgattgtctgccctaatgtgtttcatttacatgtttataacgtcaatggtgctggggtgtccactgtaccattcattcccgcattcccacaagggggcaattgtctgaatggccaagtcagacacctttttgattgctctttggttgtcttttcagagcaaagagataaaggaggaaaatctgtgatgcagaaacactagttgaaaatatacagaattaaatgtcaccacaaaagcagatgttaacataagcccaaatatgctttttagccaagatgtgaaggttgaaaaaaataattcagagcagagggaaggatgatttaaaccaataaatatagccctattccccctctttacttcttttctgtctttagcaatcagaagatgaaatgtaattttccttttcatttttaagccttgaaacatccaggcacctcctcattatttgtatgtttgctgtgatttgtgaattttgtatatatttacatagctctgtttatgccaacagcatcagcttaccacttggaaaatctattgaatgactatttgggctgtggggagggtaaacttttaaaaagtaagatccaagtatttcttcatcaagcagtttttaaaaggaaaacgataataatcagtaggctccatggaagcctttgccttaatagctatgtgccaaatacttttatcttgtgtgacagtcatgtcagagtgaaatctctcaggaaaagtgtaactagtagttacaaagtaaataaaggatttcattttaaggtgttctgtagtgtttttatgctgtgtatgtgcatgtgtgtgttttgtcttgtgtttcctctgaggaggtaagaagaaaagccatccatgcgtgtatcttttggcttttctcttctttccgttctctcctacatattatgcatatatgtagcccacatgaatacacctgtttaaaagaaaatcacagttcagatggtgccttgctggttcatttaggaaacaacagttattagaagttggtctgatttcgcgtgtggtccatgaagacagaaaataccaactcttgtgtcatctggtgggaggcaaatgggggaaaaacttttataattttgtagtaaattagagaggggaaaaaaactgccagtctgtgaaaagatttttgcctctccgggaagacacacacacacccagtagctgcaccgttagctgaacccctgacacggcggtcttttgaatgccttaggtatgatttcactttcgctcacatcaatgctgacctgaatgcctttcatatctgatccgctgtgtctctcccagtaaacatcccctgaggggagaacaaagaaaggagctcttcttcttcttaatcacaattcagccctttcaccgccggcaggctccatttgcattctgccacagaaagccaagatgaaaagaaagagagagagaaagagagagagagagagagagagagagagaggcacagggtagtagctgagtaaaataacttaggtgtttgtggctgtttgttgggcttcccctagttaccagccttatatagctgatgctccaccaggccctgtccctcctgacaggcatatagtgttacaagatggcatgtctgtactattcatggccacccgctcaacacttgaggtaaaaagtgtcaggaggggatcgaattctcccccagaagcctgttagatttggggtcaggtgtgtggacttcccgcccttaagtgctgcctacgatttggctttaataagtctgattgtttaccagcggaccagagaggtgagggccctgggggtgggagggacgggcgagctggagactgggcccctggtctggtttcagtgacgggtcctcacacccagcctgaacacactgataaatcctcaggaaaactggaaaagactttcccatttttccccctgactttttatgataattcatattttcaaatgaaaggggaaaaaagccaagaagaaactctcaaatgagccaaaaaggaaaaaaaaaattctctgaaaagaattttagggggaaaagttgtgctattttaaaaagctttgagggctgtaaagtgccacgtttttcacaccttctccatacttttttttcagatttttttagtatgtttaacatttgtgagatgacagcctttttgtatctcaaactggatgcttcaggatttgtaggggaggggttggtggtattcacgttctcttgtgagagaaagtttgtgcctaaaggcctccttcctgggaactgtttaaaccctcgcaggcagacctgtcaggttttactgtgttatttgccaccattttcaacatgcaaaagtaacatgcagttaatggtattggaatgagaccacagcaagagcagaaacctctcgtgacaacttttcagcgacattatcttgctcctagactgtcttgtctttttcttcccctttctgaaaccacttttgagataccaataattttctcccaacaattagattaaggatacaatgcgctcacacacatgcaccacacacacacacattcacacacacaaacacacacacaaactttggaagtgcaatctcttccaacagcagagtgaatgatttgaaacgggggcttttccaataacccttgtggaagatttcacttataagagcaaaactaacggatatattagaagttgtgcgaacatgtgacacagattcctgatttttttttctttttcccagaagatttacagaatttacaaaaagagattatccctacaccttccacccctcctatccacccccatgacccaagcaatgaaggatttaggcagatttacttcagtaaacacctttggacacttgcggggaaagtgggagtctgtttgcaaaaggaggcttttgttaagtgaggtacggggataatgctttaccaggcagctgtgatattaacctacccagcaatgcgggaacactctttaactctttgagtgcctggccccttgcgctcagcagataaaatcctggctctccaaagacactcagaattctggctctagcagtttattattcagacaagtcttataggcatgaaaactgttcaagcttttaaaacaatgtggtttaattagatgaggtggacttacattgctcataagccctccaaatggtggtttataattggcaagggaaaaaaaaaagatagaaaaaaggaatcaaggcagcacattaaaaattccaggaaatatctttagaaaagctattttcatttctagcttttaaaatattagactacggtagctagagggaatgaagcagctggggcctctctccttcctataaaagacaccagaagtttgtgatgaagaaaggggcttcaacttgaaaagctatgagaggccagttcggacagtgatatgatctcagccttcgcatcttttcaagggggaagtactgcctatctgtccaaacctgggaggtcatgtgaacctcagagtcagggcctcaggctggccgttaccaacttgagactttccaaagcaagcagagaggcatttatgaggaaggagttaatggttattttttgctgggcacaagaataactttacaggtgttgcatttgggcttaaataagattgccttatttagtttcgaaaaagagtgtaggtgtcaacattcgagcagccacaaatgtgtgagaaagtaaagggtatgagacatgacggaattaaaggtgtttgctatgttgttacaccgtgtgtcaggctgcaagctccctttgtcacagcctcctggtgatttgacagcgcagatctacttcccttctaggtgagacagcatttttaaacttgagttataaatatggtacacccttcgagttgcaccctgcctcccagatccgtgaatcctatttgaaagcatcttgccctgagacacaatgaacaaacgcccgtatacaaggaggctgtgggctcgggggcccgggcagcgccagcatcacagtagctggcattgactgttgtttggcaagaaggtcctctgccaaatcatccaataattaagttttatgttatttgtatgaacgaccaagcatgcagtattccttttcaaatcaaagggaggcttaaaattactttttgaacactttcagaccatggtcaggtcacagtttgggggctgaattaaaatgatctcattcatgatctaattgaggttggcaaaaccttagcagtagcaggagtacataaatataaatcaaagaccaaaatttagcaaatcatatcatttgctagaaatctgctcatgaattattctccgattgccaacccagaagttaaactttgtctcccctcagcaacagtaactgcgcatattttttcaggcttctgacaggaaagttagaggatctgaaaagagaaaggagaaggaagatgatcactgtgtcatcagatatggtacatttgtgacccaagaaactatgagagctgataaagccatgtacgtttacagtggctgctgcagccttggttagaaattaatatgggtttctaaaaaccagactttggaagagcaggcagcacagacacattaagagtgtaaggggagcaaacgtttcaagaagggtctgattgtactttgctttcattttttcaattgaggaatgtaatcatcataatgattcatgattatttacaaatttagttctatcactgagctgggtccagggattgagatttgaagtagtggttagaactagaagacgatacggagctgttagtgtgcatattcaggttacctttcattctttctttctttttaacgctgctataaaattaagactccaaataacttttcctataatctgtgggattaaatgtcatactctattgtatctaatccatttttaagttgtaaatttttcttgtttgctgtgtatgatttcatcttaaacccacacaacactttactataaactagaagaggtctaattctacagttgaatcttttgaagttaaaattttaaatcctgtgtaaaagaagatgttcttttaatcaaacagtaaacacagaactggtcagttggccacctttatatatcacaaatatatgaaggtatacttttaaatcttcaggataaactaaggtgggaacatttaaaaataatctcaggtgagagaggtagatgaccacattcctgggaataggtaactgtcattaatgatttcctaaaatgtattctacattaaaaaaactgtaatggatttctctttaatagttacgttgcccatagacaacatagtgatttttgttctttatatactgtttcttatttttttataataactcaaggaaaggtactcctgacaagatgatagccaccccctcctcccaaatatgaaataatcagtaatagatgaacagattaaaatattgtgctatataaaatctgaggtttttttctttctctcaaatggatgagtaaatttcaaggaattcagtgcccaagtgatctataaatgtaatatattgctttcaatgtttcttagtttaagaaagtatttattgtcttgtatatccaagtaactgtaatcaaggaaattgcaattgcctattcttggaagtacctaagtttctattttagacaccatgcacatcaatggaagtgtttcacatcatgagaattctcagttttaagaggtgaggtttatatataaggaactcagtaagctgtgttttcataataaatagacccattaagagggaaatatctctgagcaaaatggttgtcctctaaagatttcccatcacctttgctctgctgatgggaatttgaaaactaaatacagcccatgtgcacacattcccacatgcacacaaacacaaatgcaccctaggatccaaactctgagaattttcctctttaactttcactacagtcatctagcttgtgaatgaaatacacttaaacaaaaatagtagaggcgaagaattaatgtagattcttgtttagtaggatttattgtaggggggaaatgtgttccctatgccacatgattcttacgaaacttacacctattaatctaagctttaagtgtattatttaggataaattactagctttctgcttttgtactgttttctcccattttccttcagtattaccaatcttaacacagattatcctaaactgattgcaaattattatggtttttaaaacagcattctggagtcctgaataaagatggtattttaaactagtgtttacaatatacagaataaaaaagggtgggggagatttaaaaccataccgaacacttagaaatgtgtggagttttatacttgtgcagataagtgtgaggtagccttgccctgtgaaaccaagaccacaaatgatacgtgtcagtaggttctttgatagggcttctggccacagtgtttttgtgctgtcaaactgctatgttgaacaaacacctcctctgggacagagtgataaatgcagagacaggctggcttcaaccagtctcagcaacctcctcaaccacaccccccactcccagcccacctcctacctcctacaatccagccacctcccactccactttgcccctttacctgaaattgacatttatatagaggtgcccaggattttttaaggtgtcagtggtgagtaattgttgatactccccaaatcttatgaatcagtactctgaaactgcaggcaaagtcctttttctggcaggctttatctagtctttttaaatggaactggactgagcttctaaacttttgccaacttgaactttttccacctttgcttaatcacttgaaaaccacttgctttccttgtctttcccccagtcgctttttattttctaatgttcaagctattacattgtgcaacacagacaaaattttgccttaaaaaatccaaacactattacctcttacttttcactttctagcattcttttagggctaacatttcaaatgtatagtcaactggtctttttttttttttcttctctctcttggagccattattctctgactaaaacctgtttactggtgcctttgtgtgtgcgttttttccccctgacattaaatgaatttccatcttctacttctgcaatctctaagaaatagataaaccattatattttttccctgctcgtattttaaagtggtgatcctgacagcaggacgattattgcactttatgttttagtggatgtttgctgttgctagttacagcaacacttatcataagacagcaagaaaagagtagtccctggtaattaaagtaatgaaatattcatttactctaccttttctgtagtctcacaaattaggctgctacatttaatgcctgcactgcctctgtttttattataatggcagctttcgcatctgcaattaggactaattctgacagttacaatttctgagggatggtaaacagtgaacgagatgtgcagcagaggtattacacgtgaaaagcccttgtctctttaaccttgttgttttttttctcgcagaggttaccttttcccgatggtgcaaaatcgacttgacataactgttcatcagtttcagggttttccctggaggtatttgcatcaaatcagcccagtcaagcttcaagttgaaattggcaggccagaaactcacagggtagagactggaaaagagacagccaaagtacaggcagcaaactgacagcagcagagtgaaagacagaggggtggggggaggttgagagcgagagcttttcaactttagtgtgcgggaaatctcagctcctcctgtactgatctcagcagcaccatatcctgaaggagcttgaaaggttgagattcagaacaccttcagctaattcttaccactagggctcaccagccttgctccgggggtttgctctcacttaatctgattggatgcctaaagaggagtgggcacacttaattaaacggaaggaaagttctgaggcacctccccagcacttattaaagcttgaaagccaaatctcatgatcagtgttataggaggaaattaaggtggtttgttttttttgttgtttttttttttttttctaattgttaacttgtaggaaagtgaacaatccctctctttaccaggtttgttttcttgggggttctcttctgagtagattaaatgttcacagagactagagctcaggggactgtccattcaaaagctaatgcattttggctaacaaaaagccagtacaagtagcaaaaattatatttgaagagatactcctttgaatgacatgggtttgcaagttctctgtcaaataatgccctactatcctggtaatatgagaacacgtattaagttgtttaaaaggtcaaaaaacatggcaaaaccttaagatgtctaagatactcaacttttactctcaacaaggtcactttaagaaaaattctatgattgcaaaacttgtataattgcttttacaaagaaaacaaatatgaaaagtgtttcctttgcctgagaacattttttctccttgatgtcttaaaaaaaaaaattgtcatccttccccgtctcttctaactttggagtgggagggggctggtgtttttactagatgatttaaaatcctccttactttccaactagacttgggggtcgaataagcccttgctttcaaaccgttttctagctctgtgtatgacaggcattggctgatctgctgatgcccattcgacaggcactgttgaactaaagtggtgtgacggcacagttttgttaagctgtgaacaaagggctgaagatgccttgctggcatcatccatgtgcatattggccttgtcacagttttgcttgatttaatgctctgtttattcctagatattaaaacttaaattctgaacaatatgttttcaaatactacataccaactttattttaaaagctttaactttgaggaccctagggtccatttgctcatccagtttctgtgtagccaacattaaaacacagctttggaaataaatagattgccagtagcctcttagctgttatccatttaaaaatgggattccagtctttaaaagtcttattaggataaaagatttatttttctttgatcattggttgaaagtcattatttatttccaacactggattgtcacataaattcctaaggaagagttaccttgtgtgtactcagtgcagtcagagtagactttttaaaatgacaaattattaaagagatattcagtaataaaagaaagcctataagaatacctataagggtaggcacatcaccactgagagaaaaaaaaaaatcaagggagtttatgttaaagtgagccctatttaagagatagcagaagaattaagattgagacttaaaaacaaaataattgttatgaaaatccctgttccagaggcaacagctcgcctatctaaagaaatcttaagtttggtactaaatttagattccagcgtcccgttgaatgtgtcttgagctttatctacgctgggtttttgttccccctctgcctctctttccactcttcaggttttcttcaagtgtttgctaagagattagttagcaagtttatattgaggaggtagccatgggaggcagctctctgcttgaaggaacgcgcagtgggtcagagtgagaagatacagggagctaagactgactaaggcctgggatcaggtactttattttctctcaaagacaaaccgcccatagaaaggttggtgggatggcatctgccagcaggagcacagatgttaccacttttagaaacttccaaacaagcattattgctggaataactttatgaaaaaaaaaatctgctgccagaatactcctttttcattatgtaaagaggctataatttgagatattcaaggttatttttacctccattcataaaacagcatctttcttgagagctgttacgagttaggtgaggaaggtggcaaaggagagaaaaatactcagcagcctaaaagtattgctgctgctaataaccggtgagactgcactaagaatctgaaatggaatctccggggtaaaacacatccacatttctacctgccctaagcgtgctttcttagcagtgactgagatgaattgtccatttcttttcagtggtagtttttctccatgttcacttatgccaaataattcccacagccagaaagagtgatacaggtcggggtggctaggaaagaataagcctttattgctagtttttgtataacatcaggcatgagaaagacacttgctaacagcatagattgcaagacactctgtggcctgttctcttagtttcatgagaaaattttgtccaatcccataggtgtgaacaagatttagacatgtaatctccaacctggaaaagaagagagcttttaatatattaatagggcagattcttacttaatatataaagtgaattttggcatcagtttggggtttcctattaatactttgttagcaactgtttatggaagagacaaacagcagttcatccaaatagtcctccttccccaacccccaacccctatcttggtattaactgctttgtcctgtcagcttataacattctatctttaaattactctaaatgaagtcataattctagttatgttttgtaacaagtccatggctaggaccaacatgacttctcaccttttaatgaactgttctactttaggatcttctaaggaatagagtgtaaaaagaagcaaagcaggagatgaagaggtctcgtaaatagtttcctttgaacatccacaattgcttacatggccttttccccttttttccaggctggcagaaatggcctagcccaggactcattcaagtgagcacatttcagaatgactcattggatgattggagggagacacaagccctacgataccaatgcagtgtattaatggagaaagttcctgagattgggagtgggtgtgacattaggctagggtattcctgaagggctctaattcatgtgagaatattaagtgtagatcttctagctatcagttagcgtaaggtttcataaacaggtaatgatggctctttccccccgctacccccccatccaatttctagctgagtgaggaacaggctctgcttcatataaatacgatctttgaatttatctgcaatgaggtacagctttaatgatctgtatctgcaagccaggagcatgaatgtgatcttattgtatcatagtgtagagatgagataggctagcgctacagcacaccagtgcattgtgcctgggtgtcgggagcaatccttccatttccaaagcagcaactctttatttttcatcattgtttctttacctcacttgtatgctccttgtgatacagatctgagtgagttgtgcaagcttcagacttgccagcccccagctcccaggcctagtacagagtaattcataaacttaccatattagactatcagattgaaaccaagggtttctactgtggtggaattggaaagcccattgttttgattatcatttcatcagccccaactgatactagtatgctcaaggaaaacatacttcagttacagttgattttcagattccaaaatggtgctgcaaagcctgtgcatctctaattatattttatgctaggctgtgcaataccaaaatatacgccgcagcaatcagtgagtgaacagtatcaatcaatttgtaaacagatgaagtcactcattcccaaactggttttccaaaaacaattactaaattacaatagaaaaaaattgtacagttactgtatttgtgtgctgtgttacaatcaacataccagggaaacaaaacaatttaatgcagaaaaatcatcattcatctacattataattgcttctttttcacatctacagggcggttaattaaaattgtgattaaatgcggtcgcgctgcctaagatgtcttgcccaaaacaggtggtacagaatttaaaagtaaaaaaaatgtaattagcattggaaattgagaaattgcctgtaagaatcagtgttaatttcagtcagtgatgaggtaatttataaatgaatgcagtggaggctgtgcaaatgcacaattgccttccttgccattcttagcattctcagcatgcaggtgaaaatgttttcaaaatattgaggtaatttgaaaatcaatccatgcattctgtatcttttttctcccatttgtaccaaatgctgaacaaatgctgccatagatggcacaatccatcagttttttactttctaaaagtaatgctgcacatattttagacctagattaagaaatataacaacacaaattgcaagcctaaaattgttacacgggtcaaaattgtacacctgaacttctgactaatggagatttggttggctgtgaaatgctcccatcaataaaatagagacatggggggaaatctgtccatggtgtaggtggtacaaacagaatgactattaaccaatccaataaatacttgagattaaatttttaaagtttaagaaagaaacagaaaatttataataaggctgatatttttcttagaatcttgaaccgtaactttgttattccatctagaaacatctaaaaccagttaataaagttatcactagaaaaagcgtttacagaaattaactgtttttcaatgtcatctttcctttcaacaaagatgcaactttctacaaaacattatgctatcaacttactatatttcaagcgttctattggcaaatgagtggattctatagattagatactggttaaaaattatttctatttacgctgtatttttactattaaaccgctagacttttaaaatcttttaatggaagaaatttaactttcatgtgcttattctgaccctctgaacaatatgaatttaaaatattttaataatgaattgagaatatggggtttgagtatctggcttgataccactggagttaagagactttgtggggctttttaagcatcctcttctgtgtttggcattctgcaaaatgatctctccatataaagctcatcctaagaatatgcttatttaattgtggcagatcaatctgatgatcaaattctctcatgtaaaatattctacgtgttttttgctgtttcaggcagaaatcaataatttcacttcactctgaagttatgttttgtggtaatacggacattttcgggagaaaggtgaaaaataagaaatactgtatctctgggagtgtcatctttattcattcattcattcatttttagagacagggtctcactctgtggttcagactagagtgcagtggcaccatcctagctcacagcagctgagattcctgggctcaagggatctctgggagtatctttctatcctctgatttcaggcctagtttcgggccttccctcatgacccttcctgatcatttttaggacacaaatgaaaagtgcaatttagaggtgacagctcagctggttgttccaagtggcatgccatcgtttctctcatatttaaatctgtttcccatttaatattacaagtagaaataaaatgagacctctaaatggaggaaactgaaaggtcaccagttaactccatgatccctctcctttcaccagctcttgcctcccactaactgtgatgatgacgatttcatattccagcagtcagttcactttcagcgagggtgggtgcagacttcatcaaagaatggcttcctggatttccttcaggacctgtgaacataagatccgcaaccacatggggcttggctcaaatttcagcagagtggtgggatggaggaggtattatgacgtgctccaggctgcactggttctgagtttacaaggggtcacaagggttagagaatcacagatgtcaatagagcgcgaggaccttcctaccccttgaaatatttgcagtagaaatcttacctctttacgtttggttcgtagtgccctatgagcttagcagggcaatgtggagttacttgtgagatgccaccaatgtttcatatatatatatagtatattatataatatataatattaatatatattatataatatataatattaatatatattatataatatataatattaatatatattatataatatataatattaatatatattatataatatataatattaatatattatataatatataatattaatatattatataatatataatattaatatatattatataatatataatattaatatatattatataatatataatatatatgttgagaatgacatatatatatatgttgagaatgacatatatatatatatgttgagaatgacatatatatatatatgttgagaatgacagtgtctttttatacaagctccctccaccaagtatcatctctgtactcttacagggtcatcaagattgtcagaaaaggcctggactacatgcctgtcccagcactagattggtattttttaagtccttttttgtttcaaagtttgccatgtgagcttaactcagttcattctgctattattacaagcatcacctctttgaagctgttatcagattcatgaaagaaaaatgcgcattttctttttctactgagggcttctttcacctttattcctgagagtgatcagagctttgaattgtaaaaaaagaaaaattttctcattgtacaataattgaaaagtatgtcatcaggtcctttctaggtcttcctgtggtatgtcagcagaaaactacagtgtttgttcattttgcattaattacacacctactatgtgcaggctctggctgaggtctgtggatcaaaaaatggatgctagagcctgggcccctgaggagcttgctgtctagtgggaaatgggggtgcatttaagatatgatgaaaatgtggcaagtgccacaaagaactttctacccaatacagagagagtacagaggatggcacaactagatctgggagaaggtggtgaggggtcacttcatggcagaggtgacttttgaggagactgttgtcatataacatggatttcaccagcaagtgagggcacagcacgctgggctgagaggatggcatgtacaagccaggagaaagggtgaacagcgcaggcattgtcagccaactgagatgtctgaaacacagggcatgagcaaagaggatgggcttgatttgagtctgcaaaggtggtcagggagcagaagaatgtcctatcccatatttttggcttgtatccagtaaataggtgatggtgagcttgcgaaccatgttttatagaagagtgacataattatatttgcgtttcagtgacacgtctctggcaactgtacgaaagatattatcatctaacatttgttgagtacttaacaatgtgctgggacccgtgctaagaattttgcctatgtcatctgatctcgccccaacaataatgctgtgaaatgggtactattattttcatactatttttactgatgaggaaattaaggtttagaaagggcatgagcctggagtcaggaagaaagtctacggttacatgttactgtaatcatggaatttctagaattacaagcaacacaggcaataatgatcattgactagaaggacatttggaaaagaaaacccagcgtttgaaaaagagtgaggcagtttgattctgtttctctgagtgaatagtgagactaagtggggtgtaaggatgtttcatcctcaaaatttattttttctttcattactatgtcagtttgaaaaagaaaataaaaaatggttgttgatcctgaagaaactaatcctagaatgtgctacatctttgagagtttggaaagagacagttaacatacaacccttcaaaacagtggaatttggtaaaccctggaacactgttcttgctgatctaattcatgacattaaggccttcctcggccttatgaggaagcagatgaaaataatccttttgcgatgactattttcccccttttctgatttaactcttccattgcctaagactcaccaattctcaaacttctaaattctccacactgccttatctctgccatcccatggcaagtcctaaagctgctaacattttgtaacaactatgtgacaaattgttgtgcttttattcaggtcggacatctttgccaggcttgcttgttgtgttttctgtttggctgtgtcatgggaccaaaggtgcctgcctttgtacagcatgtcaaatctggttaacatgcagccatttatctttaaaaccactcctgcacaatggcagaggtgggccaagccacagggctctaagcacaacccaatttttcagaccatcttttctgcatatagggagcacgttggacagcagacaagacattttgtgatttggggaatctcttagagacaaattgtagagtgcaagtgcagtgtaactggactgctgggtgcccagtgaagtgaggaaaatcagatacagcacaggctgaaagaatgaagcaagaattcatatctctgtgcagaacatgcacagtactttgctcacacagagagttcacacatagacaaaagcatgtttgcttgtgggttattttcaggggattctatagccacagtctaggcgtatatatttgcacgtaagctttctttctgcattttgtactggtaggtgtgtctacatgtgaacatgtaaacatgcttatatgagaagacaatttgctgttgctgatttaagacacgggaaaggcctcctagttcactgaggcgtttccctcctaatgtagtagaagcagaatctttttgttttctacaattgttttaataaaggactctgtgtgtgtttaaggaagactcagagccagagtgtcaagtgctgcagtgaaaaatactgaagatttttctttccataagacagctgcaaactttataacccagttcactctgggttttcatttctcaattgtttcaaggtgtcttgggaatgatttgcccttaaataactagttatcaacaaaggagaaaaaatagcaataaaaaatgtgataaacctgcatagactagtttaactaaaatgaagaatttccttgcttggagcagttcaaggaccgaacatagcaaaactgtgtgatttaaatgaaatattcagagtggtcaacataaatacacatgtagacaagagatagtatatgtgtgtgtgtatacactgaggttacttcttgaagaaataggcattttttcctttctttttgctttttctttcttttctttttctgagtaaaggaccccagagattgtctttcactttgaaaacaatctctaatatcaggaaaatgcgctgtttgtttatgcgtacataatgcaagtttgtccgcctgggaactgcagcaaatgggagaagtatgcatggatttcacaggtaacaggattacgtgggcacataattgatccatttggagaaaaaaaatgacagtgctctaaagatgcctaggctttggagatggagtttatgaaacaggcatttgtaaattcaaaggaatcaatatgtcaattttattacatctcagaaccagctgggcattaaaggaacagtagccttaaaaaaaattacagctgcatattcctacgttgtctacctttcttaaaggccctagaatttaaggaaatgaacttagagatgtgtaccttttcagaaatgaatttacattgtccaaagagaacaacaatttaacattatgtcagttatcaacctaaaaatttgattgaaatgtctgccttatcattacaattgaagtctattaatagatacagataataagcagaatagtgattttcacataggttgcactgtcaaggattcattggaattcatatttgcattgtgcttttcaacagtctagattttacctcttcactgatgataggacatagtttaagagctagcctttgggtgtcccacagaattgggtctgtgcatgtgtgaaatattcctgttttattagagtttttgacaatctatttttttttttttttttttttttttgagacggagtctcgctctgtcgcccaggctggagtggagtggcgcgatctcggctcactgcaagctccgcctcccgggttcaggccattctcctgcctcagcctcccgagtagctgggactacaggtgcctgcaaccacgcccggctaattttttgtatttttagtagagacagggtttcactgtgttagccaggacggtctcgatctcctgacctcgtgatccgcccgcctcggcctcccaaagtgctgggattacaggcgtgagccactgcgcctggccgtttttgacaatctaaaaagaccaagctattttaaattattaagttcctaaataataggatttggacagcagccataagagaggtgaatgggatgggaatttaagatactattttaatatcacaaagaggttacacaactaaggatgaaagttagaagctatgaattggtccacatactctgcatgtgctgtctgctagaggctgcaaggcgagctgcttcactgtttcatgttccaatctccaccacccagactcctgctccaataacatctctagatctattcacttgtaacaaatggagcccagttctcctccctccccaaggaggccagacactcgatataatgaaaagaacacaggattcagacccaaacaaatttgtgtccacattctgattctgccatttactctccatgccatgtgcccctgggtgcgtttcttaaccactctgaacttcggttcttaatgcttaaaaatggggagcagtatttgttttatagaatctttgggagtattacacaaaattctaaagacagtgtctggagcctagaaaacgctcactaaattctgattatgactgtttcaaggtgtgactaatcaggatgccaggaaccctacgatggaggcacttcagtttctgggccttgctgaaacattcttgaaaagaggaaacaataaccgtagcctgagatattcgttccttttttttttactctttggagagtacttaaaaaaagaagaaaaaagaaatagtcatagtgattggcatgctattctacctctacatttccaggaaatatacatggtactttttcttatagaaacagcatctcctccaaaaagaatacattctgagatgacttttgtcacagcacttaaaatatctgattcctatttgtctccccacaaatgtgtaaatggcttgagggcagtcttgcccatctcagctcaggccatgacatacaaaaattgtttcgttaaagcaaaggtataatgaatacagcgggtatattaaagattcagtatacattatcatatgtagaaaaaagctttgggtaactttatgtcagattccctaccaccatattaataactttttgaaattcactttgtgacagctatgttattttgaatacttgagtgggtttgctttttgtttttgtttttgtttttagtttgtatttaaatcaactggctctctgcctttctcaatgacacctttgagacttgggagtcagggaggcagagaggcagtgtgggtgctcggaagagtgtaggctttggacatctgggctcaaatttggtttctactttcatacaagccataagacctgtagcaagttgttcagtctaactgcatctctgcttctcataataatactcatgttatagggcagttgggaagaaatactggtaacaggtaaagtgccaagcacatagtaggtgattaatgttctgtccccttcctccactcttctttgtcacttgagcattcactttgggttggcatttagtgagctccttctgcccgtcaacaagtcaatcaacatttaatacataccatgggtagatatcttacccctgttccaaatttcattatgaaaattgggctattttctactcaaggaaatgagcatgcagaagtaccttctgtacttagaatcacaatcattttagctattttccgcttaatctgacggtttctttgttcccatcatcttttttagtgaagcactttggtgtttctgcaatcctttgctatcattctgtgcttgggtatctcagatctctcttctcccccgatcctttgaagacatcagaaaagaagaagcacaaggtctcttgactatacgtttgccacacaactgtgtggattggttagttaatagagttgattaaaacactttgtttgattctgcttaagcataccagaaatacattcaaaatctacagctacaaaatgtaaagaaggtagtccaaatatagtactacataatgaggctccctgttggtagtatataaagcagtttagagtatagcttcaaattctaatgaagatcattttaaatcttgcactgaattgtgaatttaaaattcccatgttctccataagtatctgaagaggggcatgtaaataccataagtgaattaattactgccttaagttggtaaagcatgtgtgaatccaaactttattcttgaacttgcacttctcttcccaaggttttttgaaccatttcctatatgctgagttctgagtacctatttaactactgaggacatatgaagaaggtagttttctttgcatggattaaatgtttcaatctctgaaaatcaccaccaccacaacaaaaagtctgcccggcaccatctacatgtacatgatgaaattcctaaagcagaaaagatatatttataatctgaaacttataaaaacatgacaaactgttaccttcacttttgtgcccccttttttcattaacagtattaggtcgtttttttttttttttttctcttgagaagaaacgaaagacgaagtggcaagaatatctttcacttttgctcacgttttggtggtgtaatattgggaccactgaagtaattggacaacttttccgagctgactcttctgaagtaaacccaaggcaaagggaaaatggagctgctgctaggctcaactgatggcgcccacatggcgcccaccccagctccttcagagactccatcatttccacagaagggccagaggccctgccaatatccgcacatcactggcatgatagaccataacagcttcttctgagctgttccggtctatcgtgtcaatgcgtactcggggagtcctcaacgcacggatcactgacacggcactacataacggctccttagcagccattattgggtatcaagtcaatgcctactcagggaggctttatcgcagaggcctgcacgagcagacacattccgaatactaaaattccttaggaaaattagtcattgcccatgtgtgatagctgttttccattttgaattttaaccattttgggaaaaggaagagaatgggaaataccagtatagtccgaaaagcccttaaaaaatgagtgcgaaaagtggaagggtggagtggacataggaagatgatgaacttgtcattttttcctttccatagcttcattttattgtgtcaaagttgcagaaagcacttcactttcatcgaggctctttttaggcagggtacagccaagaaaacttttttatggctcagatgtaaatcctagaaaacgtagtagaaatgatggcaggatctctaactgtaaaataacagtagtgttagtagtaagtgtcattataataacgttatagaactctgcacatcaaaaataccacattttatcatgatctctgcaagagatttctgttggtagtcattctagacttctaataaataatacgttgagtaggaaaggttctgtgaggatccaaataataatgaaaatgacagtggtgatattaataataatagtacagctcccatttattgtatcattattatgtggcaggcatttgtatacattatctcatttaattttctcagcagatgtgacaaatcaggaaactgtggcttagcaaagttaaataacttgactgatgtcatgcaaccactaagtgacagtggtgggatttgaactatatctggggagagtcatgctcttaccattgcattgcctctaatgatcatcactttcagggaactaggtgtttaattagaatatcccaacccattgtctgcttactgatcaggaaactgaggcagggtaattttagtaattcccccaaataataaagagagtcagaatgaataccagaaagcaacaagaggcaaaaacagcctttctctctgacaacatgttaaccacaaacaagacatgggaatttcagagcctccgtttgtgtttcagaaggaatgtccactgttgccatcagtcctgaaaagatttccttgcaccaaatcaaaatggttcgagtttgctgttgttgatattttttttccttttgtgttctgcttactgactgacatctgctatcatgctaagcaggtgttcctatgtaaacgaacgtgccctgtttgtgtttcgccatcctcgctgctgcgcacccaaatgagcagcgtgattaagaatcctgtaaatttttgaaaggaaacggatggctaccctactagaacataattacaccgttccaacatccgcagctcactgctgcagcagagttggagaacagcagaaattaataatatataatagcatcattctagtaatttataaatgaaataaagtagagaggagattctgctgatatgcattttctccttaattctaaaagacaaagtatagattagaattttagtggggtgaaacctggccagcagtctcccactagttgcctgattcatgataggagtgtttttgcttagggaaaagagctaatatgttttattaggccagaggaaaaaaagaaaaagaaacatgaataaacaaggccctctaaaggcaacactaaataaagggggtctgaaaaaatctctgtggattgtgtgcccactgtatttaaaaagatattattactttaagacttcaacatgtgctgcattttttctttcattgtaataacataccaccataggtcaccccttctgagaaaagagggactgatcagttaaagatgtggcccaacataaactttatgttaaatagcactcgtgtaaattctagagatctgctgaacaacaatacacccatagttagcaataatagagtagatttcatcttgtatgttttatcacaataaaaaagaacattcatgcctttttaaaaacattattttgagtacccagtatgtgcaaaggagcctcttattacaaatcatcgttagattaagggagttgatgcttttagtcaaccatgctggagaaagaacaacactttctaaagaggcaaataaactatatgttaaaagtaaccagtccatttctctgtctcatagggttgtggcaggcactttagaaactttaatgtttttctaacttcatttaccgtaggtaagatgcctaacaaatggatgagctcagttgtttcaagagtttgtctcccatgagccaatgcccatcacacacacacacacacacacacacacacacactcacacacgagcaattatccttaagaaaaataatatttatagcacttaaagtgttatttaagcaacttttcctgcttaattccaaagaatgacaatacatccaaaaaaaaaagtcatggattttcttcctttaattaaacttagagaacatgaaaatactgtttgcctttcaagagaagcatgtccatttaagatgcttattcatttaagcagtattcatttaaaggtccccttgagtattactctatgtgttttgatttggttcagagaaaataaattcatttaatagatttatttcattaacaggtatttatttaagtgggttccactgtatttaaatctccaaacagtttccattacttccttagctcacttgctccatgttgactaattttaataagcctaaggtgcctagggtcttattgagtgttcagtttgatcaatatggttaaattaaaattgtgcaaaatataagcaaatgtactctaacaacacagtgaaaaatgtgctgtgcactaagcattgattggtatgctgtggacacagatatatgaagctgggtgggcctctgaactacctggaaactgccactctcctccaaagctcccctggctttagatacatccatgtgatctcccacccgttcatggagacagcagctcagatacccccattgaattagaaggggaaggagattcatgtcaggtgttttgctttttgatttaatggaaaacagcatgtaaggctcacagtgaaatcctatataaagaaaaaaagctaagattttataaaagttcaactttgagtattgctgaaatgctttaggtaataaagaatgcaggccctagttctttttcacagaataactttttaccgtaattatccttaaattttaatcatttggtagcttgaattctttttcagagatcttacttgtcaagtttgttttagcaaattacaaaaaaacaaaaacaaaagccaacctgatttttaaagtataccaaaatcagctttgccattggtactgcatttgaaaacctagtaagctttctaacaaattcattgctttctatataattgtaaagttaaatagataactgaatatttttagtggattccttttagtatgaataagtttgtatcttctattcctaaatcaatttctttacctttccctttttctcttctttttttctccttttttgcctgttttatggcaagcatacttaatattcagtgtcaatctttttaagcttttcaaaaatctaccacaatcacttaccaatcataagtatatatcattcaaaattgttcctgatatgtgctggctgttggggcagtttctttttcctacctgttgtgtgcctttgtacctatctttaatctcttcttgctaagtgatagctaccatcacaacactggctttccttgatagcatatcttcctgcatgtccaaaacttaagttcacatgagcagaagttgttcttatcaaaggtaaatcagaagttaaaaaaaaaagcagagagataaaaacatcaaaaatgtacatcttgcaagcaatgatgttgaatttgggagaagtgtgttctattgaaatgaaaatcattttctagtttaaactgatcacggaagtttatatgcataataaggatttgaagtttcctatcaaattaagtacagtgtttgagcttcctaacatttaataataccatcaccaatacacctgcaaaataaaataatgtttgagccccaaaatcatcagaaatatgtagaccaataccagttcagaagaattgactttatttttgtaatggggccaagaaaaattcttaggtttttgtttagttttgtgcttgttaatcttgatttttcccagtgttttgcatgttttgagtttttaatatcaaaggtactgctctttgtaaacaagtgtaagtttacccaggcagcttcacttacacccttcccttgtaatcagatgtgaaaattacaccctcccttttggatacatgataattacacatttcaacatgcaaagaattgtctctgtttcagttgttggaatgaaaaagctgagacatttcagtaaaatatattattatattaaagatcatttccataattgttttcgggatttgtaatcaaaaccatgatcaaggtagtcttagttttaaaaagaatacacatggaaataaggagaggataaaattaattgccgagttccacttgaatgaccattcttttattttatgaaaatacagttaagtacattatattctttctttaaaaaaaaaaaaaaccttctagtaccttatttgacattttctttctccatgttcgttgaattacctattttttcaggtcgaccaaaaaaatgtagaaatacacatttttgtgatcaaggtgaaaaatttagtcagaagagagatataaatacaatgaaggaatcttttcaagaaaagatgtgtttgtttttgtttgcaagagtgcttttcagccaaatataaaattttgtaaactcaggtaaggcacctcacacttcacaatcagacttctggattcatctagagtatcactcatatcataggtaaaaatatatgtcactattggtataaaatacactgaagccttaaaaatgcagaggttttggcaaataacactaactcaaaaatatcttgtatatccaaggagagggtttaaaatcaccgattcctttttactttcttaagctaagaagaaaaggaagagagaggccaggcgcagtggctcacacctgtaatcccagcactttgggaggccgagacaggtggattgcctgaggtcaggagttggagactagtctggccaacatggtgaaaccccgtatctactaaaaatacaaaaattagccgggcgtggtggcgagtgcctgtaatcctagctacttgggaggctgaggcaggagaacagcttgaacccagaggcgaaggttgcagtgagccgagatcatgccgttgcaccccagctcaggtgacagcgtgagactctgatgcaaaaataaataaagaaataaaagaaaaggaagagagaaggcagcattagatggctgatgttatggcttcgtgaaacagtttatggcataaagaaataactccccaactccttagttttccaagtatgtaaatgtttctgctcatccaaacactagcataggtaagtgaggacacatatttcatctagcccaaatatattttttaaaagaatccctgcagattttttgcttctataaaaaatatcccaacccaaatttctaaaaattttgatttttggaattaaatgataatactaattagcatttacctatacatccttttctattttaaaatcattgcataatctggcatttatatttaattttctaaatcattttccctagagagcattcatgtaattttagaacttggaaggaaccaggatttcaactatactcatccacagacttttcccattgggtagaaattgaaacagaactgacagaaccaggatttgaataccagccttttgactccaaatcagggacaagatgcagttttgtatgttaattatttttattggttttgatattgtggccccaagatccatagtcttattttcatgctaagtgactctttactctgaagggccaggttataattgccatgtatgccaagagtgaagggacccaggaccagaaaattcagtatgcccgggtggtgagtttttagacttatggagctgcatgttctgaactccacgttctttggttttactgctcctgtgttttttgacagttgcttttttttttcttcataatttctgtacaggctgggcagagagttcaggaaatgttccaccgtgtactgacattcccctggcaataagtgggttcccacttcagtcgcattccactaagcctattttggcaccatagagagggtgatgagagggaagagtcagtggaggagaagacaggaaggttgccaggaaggaattgaaaggcatatgctcctggccccattgcctgtgtctgccttcaccacctttagcttcacaagcagtggccatggcaaataggaaaaggtttgggtgggagaaatacagaagaagccattcctgattaggccatgtgtcttccactagtttccatcagagtgggctgaccgatctgtgaagatctgggatcatgactcagtataacaagaagagtcctacacatttgattcaggaaatttgggctcctggcccacccagccctgccttccaatctcagcatggccttggacacatccttaacctctctgggcctcacattcctaatgataaaatgcagggactggacagagattgcaaactggtggctgacagatgtttgatttgtcccacacagtattttaaacacatttgaattggttgccaatatttaaaaattgggctatttcacacacacacacacacacacacacacaaatccagatttccagctcccctggagaactcagatgatctggtgtttcgggcccacatagctgcatggaaagaccatgtgggaacaactttgagttccgtaagaaaaatcaatcaacttccctcacctgcttggcctgtgtagacatttgagtgtgggaccccaattctctccaagactcctttgaagctctagttttagaattccaaatatgatttgcttgaccataagaaatatacttaatccatagtggtttctatattcacggcagaatgctaaggtatttgtttatacaatcagcatcaggtaaaagttggaactatcttaggccaaataaatcagccccatttagaacaaatgctgactttgaaatttgataatgggaggcaggaatagttcagcaaagatagcctttgaggtagttacaagaaagatggtttggctcctgactcactattacctacacagcgaactgtgtattttgcaaattatccaaaagtagattctttaaaacccaaatcaaataatacaaggcccttcagttaacattttttcacatctcccactctaaactaacatcttcataaatattgagatcatgaactttttctgttcatgtaattgcaaacaaattatattggcctgggaactgtttgatcttcttcaaaagtaaaggaactacattgattttaaaagttatatttttgtaaatcatgtttccaaatgtatccactttaaacacaaaaggtaacatttgcgactcatggttatagagtgtttaatattgtacaaggtgcattgacaaaaatatctcatttgatctttacaacaattgtaggagctagacagagaagacatttaatacaaatgaggagtctgagacccagaaaagttggatgactattggaaaattgacctattacttgcttaatgtgaaaaagagccgggattcaaatctacagcttttggctccatatttaatgttttccatgccatcagtatgcttccagtgtcttagggtatgtgtgtgtgtgtgtgtgtgtgtgtgtgtgtgtgtgtgtgtgtgtgtcttacctaaacactgactttttctctctctctgtcatgaacaagaattgagaggttaaatgggaattgtctcatgaattgtctcaatgttttctaagttgaatgaagaatcttttttggtagctattcttaagtgaatgctggatttttattaagggaagctaacagatatttaaaagcaccctccatatataaaagcacaatccatggaagcatagtgcaaggaataatgatatagacaaatggaggaggggcaataaaaagtcataaaacaggcaggtagaggtttctggaaaaataaggtggtgagggaagagtctaactgtaaaagtaaaaaggtagaagatagaaccgttgaaaaaaaaaagaaatatcagaaatataaagagaaataaacagcaagaagactccgtagtaatttaagaagtgaaaacttttaggacagaggtaggagagaaatgggaaacactggagaggaagtaacaactaggaagtgtggaagaaaaacctgcaggccagaaatctgagcaaagacttgagagaggatgatggtaaatgtgaaacattgaaagggatgttttaagggattcagacattgagaggaaagtaaattttcatcacaacaccccatgacgacaggctcaacacatttggattatgagaaaggaaattaacatggttagaacgaaagaataaaaattagtaagagaaatctttggatgtcaatggagaggaggagaaatgatattaaaaggaaagaaggcatgggtggaaagtagaatgagatgagaacctatggtaggtggaggtgaaaaatgaaatgcgtcagggaagatcatgactgggaccgccgcacactgcagtgatgaagacggagaagctattcttcagggaacctgcaaataaaaagaaaccttaagatgtatttggagggaacccaccccagcaaggtgagaaagcaagaggttacattctgcaaaaagagaaaatgaacggggagaagggggaaaactaggggaaagagaaaacagcaaatcaaagttatggagcgtacagcattgaaaggaatgaggcattctgttggaattattcatttaagcatatgggtattggcgtcccttttctaaaaccggatcctctcccttatttctcatttttctataacactattataataaattcacatggaaaagtacaaggatgagcaattttttactttagaaatgtttcaaaaggggaggtaaacttgatggttatctgtctgaagggtgacgcactatagtggcatgtgagaatgaggccagaggtaatcatcagttttgaaattgttctttcaacaaattcataatgcatataaagtaactcgtgcacacatttatggcaaaacatactctagatattaatttatattgcttatactgaagatctcttgagttttcaaaaagtttgatttacagatttttcacatcaaaaattttttgtagattctattttgtaattaagatgtgtagactcctcaataattctttaccttgatgctgtgtatactcatttatctagattaaaatacttccttgccctgaatgttctaaaagtgtaccccttggggctctagaatttagaagtctcccttccccaactatttctagtctaccttttcaattgagttaatataatggctttagaaatacaatttccatgttgctataaaaatggggttaaaagtcataacaggcacaagaaacaggaggaaatgagaattgtgtactttcagtcacacccgggccatgtgctcgggccacatacagcatgcagccctccggagtgggctgtgtaacccggggcacacttgaggtcagggcacatagaggattaatttactgaaggtggtagacaatccctctgccacaaatgcaaacattttttcataagcgcctgaagcaattagttctcttcaataataaatttaatcttttcctccttcctttctttcctcttcgtttctcctctttcttctcttttcctctataaatgctggcctttgtctaagatcttcaactcaaaggtgtagatgccaggaaagaaaaacaaaatcaatgtattgtggtactaacaaataatgctataattattagaaaaaaacagattgaagcaagatacaaaaattctcaaaagcagctatctgtatgaaaatcttttctacttctagagagtatgtgaatgactgtatctttcatatcgtgaaagcagatgcttacatgcaatcacctttaaaaaaagaaacaaactatcacagtagtgacattgcctattttatatgagtagggaaactagccaaatagctttgggaacatttattagccttgtccttttttttcttttttttttttttaacttttagtatagagagaaaatagagatgacaggtaggtggctaagtaaggtgacaggatggcagacagcattcctatcagggcagaaagaatttataagggagctgccacttatagcgtaatagagctaagttaagaattgcaaacagagtagggccaagcaacattttaagaacaattgtccttaaacattcttgtaatgctaagtcactcatctttgtttcccacttgcttcctagagttaagaaaagttctttcctaacttgggttgctatgcagagatgtgaaatttcattggctccaaatgcttttctgtctagtagggactactgggaaccctgctaatgtgcatattgatgtaccctgtagcttcacagatgatgaaagagcatattacttatttccacaacaacaaagctaagagaaatttgaaaggagccagttattttacctggggaatttctcccaggtgatggggctatggaaccatggaatttaaatatgggggccgtcctattttctaaaaagtttttatggggagccataatatcactcccaagcagaaatcaaatcaaataaaagactattgctttcatttgcatttatttagtcaactatgcctaaaatacggaaaagatattatcatgctcattcagagtgtattttattcgttgtttactagactggactgacatgatatgatttgtgctttgcggggtcacaacaagctactagcaggacaatttgctgaatcaagaggatgattgtgtctggtgccagtcagtcgcaattaggaccaggatcagggaggcccggggcttgtgcatcgtcttgggcaagctgcatagaaatcagctcacctgaaactaattgtcacaacagagaccttatgcaaatgagccctggggttagcgtgggaaaagaaaaactgtcgcaaagataggtgacctgctgagcagggggtctgttgctggggaaatctttgttcaatgagtttaaaaatgttttcattgttcaaagtccaccccccgcccccccccccaaaaaaaagtagcatacacactcactaagagtatggcaaacacactcatctaaaattccaataaagcagaagcctgctttggagcatgccataaattgggagtctttataagggctacagcaggagaataatttccctttgcaagggcctttaaagtttaggtgctgcggattgcagtgtggcctaccttgaaaattcacttgcaaggtcaagcctattgctagcctggcaggacccgcacagccttttctccctgcattccagcaggccacctccacacagccgtgaggggtgcctgtgaactagacaagaaaggcctagtttctaattgagctttactggtatctcaggtagaagagaagggccaggagcactctcttaacacatggcaaaagaatccggggaaacaatggcagtttcttgaattgtggtttctcaaatactcacaagttcaaatgaaatgcaagcattgtgaaattccaggaatggtaatgcagcccaagtggtaatagatcataaaaatttagcaaaagaaaagtaaaaattatttttaaactatgatttactttgtttttcaatccctgacaaaaacacgtataagttggaaatgacgtttgattttattgtagcactcatttggaataatctttaatatgttttactttagaaaaccagatgaagaaaagttattcaaaggtaatgataaacatttttatacgttactgtagcaaagttgcctttgggttcttcaattgatttttagcttttcaatcttgttttcataaaaacatgggctaacatattgatacttcttagctttacactaaagatttcccagtgacatagtagataatgtatattcacacaggagtataaatataatatcaaggaaatgaaatagagtgttctaagctttagcagtaacagagagcatagatattttgcatctaatgatttcaaagaaagaataatttgaatttaaaaatgtaggtgagagaaaaagaaagtttcattgcattggcgttgaatacaaatgctattttgtttggcaaattactggacctaagaaagtgttttcattgtgtttcctaaagggctggattgaaatttggacttgtacctgataagcaagctcaggaattaacttggtagccaccacaaaacctaaagaaagttaggcttagaagtgcaacttaatcacaatttagattttaacacacacgcatacacacacatatacaactcttttgtcccttcaccactgtctgaaataatttccacataagagacatttcacagtgggtacgaagtgctcagctttcactcatcaaactttaatcggaactgcattttagtttttgaataaagaacacttaaaaaatttagatgcaaattattttgcattattcatgctctaagtgtccttgtagatttaaacacttctgaggccaccttgattcaagtaattacctaggccctcactgctccgtcatgaataaggtattttgtacaagtaaagtatgcacccgatgagcttttaaagtggctttacactgaacttgtgtattgcttcttgtgcatgagtgagccgaacatgtgtcgcaatctgtctcaggtgggaaaccctggctgggcatccatgggtgacgggatgaaacccgagcgtctccttcacacacatgctcttcctttgtctctacctaagaatgttcctgcctgattctagtagttgttttaagcattaaaaaaaagcaatagattctaggaaaagagacagggaaagtgacagtgattccgcttaaccccttcatcaccagagattattggaaatgcccacttttcaggcctcctcatctccatcagcaaaggcttccttgtaaggtaataagtctctctcattttacatggttctgtacatctgtctccccatctgtcagcccagcatcctgagctattagagctaggtgctacctccaccacggtattcacacgaaatggagcaggcttcaaactcaaaagtagctgaagaatacttacaatggaaatgaaagtgaccatagagcatcaatctgtaagtttatccacacacacaaaaagagggtttgtaagagttaaatgtaactggctgaagcttatagctggtgtttgttacaaagtacccaagcttttcctttccaacttcgtggctttgaagaattataggaattttatgatgtgctgttggagttatactggcagagattacagtaaaggggttaaagttggtttatggtagaaaaaaaattatgcagaaaccaataaaaataaacacactcaagtagactaaacttgctgggcttttagttttacttttaacaaaggaagtttagatgaaagtaaatgttgcagcttttagaaaattagttgacactcatacttgatcatctttactatacagtggtataattaatatttaaacattctaataatgcagcttgctttgcatgcacttttcagcctcacaacattatattttatctggaattgtgctagcattttcttgggtagtgcccattttcatagagttaaatttaaaatagggtagggcctcagctcttattgccagtaaaacatcaataggagagtgaacaggtttcatacatctaccagacagtttattattaagaacaatatttatttgagataatagataatatataaattttgtttcattgccccatgaatgtttttaaatgatcagaatagattaagtttgaaagttgcatttggctgttgtccactcactgttcaaaacaggaggattttgatgatgtcaaggcagtgcgaaatcagcaagtgatacatgaaacatggaacccccatgcctgcccattcattagggcatctgattaacatagtaaggaatgtttattttcagtacataaaattgtagaactttgggagcatcttctgaattgcaaaagctgaacacccaggaacttagtgaaacaataaaaatatagagaagtaagctaatttgtgagaagcctgagctagtttattttcctatgagaagtttcttcctgttccaatctcatggctgtaggtggtagggaaaagttgtttcaggtgctgccctcagctagtccctttgaagagtgcaaggtgcccagtgttcctgatcttctagtttgaatgatgagaaagagcattctacctttccaccatcacttaagtgtcctttgaaattgaatttgcatgcacatatttactgctcattctttttaagtgagtaggtgtgctgagcttcaagtctattttgagactcagcccatgttaaccccttgaggcccacttcatgataggtactgccctgtgggaatcctgtcatttagtgaagcatgaagccataatagatccacagccataccaccattggggcatctcatttcgattaattccctgaagcctttggtgctgtggtttgcagaaatcaaatggcgcaaatgagaactacaaaattaggcaggttaaatttcgcaagaaaaaaaaaagataagtagtagaaaaaatagccagtgtaaaatattagtacacaggagcagtaagtaaactaagttccacactgaaagaaccaccagatctcgagaagtagatatcaagaaacagtttgcactggctgttttatttccttatgtcagaaggaagtaggtttttacagatccttggacatgatcatctttgtttctgatattcagaaacggaaccaacagtttggtgtctatttattttatttggtttgtttttgagaaagcgagttaaataaactcagcttacaaataattaacagcccctggactatttaaaacctgctactgaggtggtagagataagttgaatccaacagctgtcacatgtatgggtttgacagataggtaagtccaagagtggacaaattaaaagcatttttcatatgctaatctccacctgcacaggaataattttttttaaggaggcagtctactggcagagcaaattcaagagctatcagtagtacattacttctaggaattatgacatgcaataatgaataaatacttctatgagaaaagtctgctgtggaatcttaattccagatgggtgtcctgacagcaatgtgccagcaatattgtggaaagaaaaatgacatatatacatacatatatatatacacgcacatatgtatatgtatatatatggcttttaaacttgaataataatttcttccatgtgtaataggttcacaattatatctaaggaattacttttttagttgcgaatagagatcaaagtgaaaacaatagtcaaccttgcccttcaggtggcagttacatgtgagctgcatagtgagtgtgagagacagtcaaggatgtcaatcagaacctacagattaacccacagcagtgaaatctgagatggtttataacaagtagataacagtttcaggcctatgtgagaacgcataaactaaaacttcatgctgggacaaaacagggcaggacatttgaggtagagagtgagaaaaccatacttttattatgacaaagcctctcccatacttgttgaaatgtcactgggttgttattaaatgctcaccatttctctaggttttatattatcttacaaaaagcttttggagtttcctttaattttgataaacattcaaatttgtgcataatttctgcacttcagctttgaatgacagaaaatttcccatgcttgttgagtttcctttcaagtaagaaagtaattcttgtaataaataaaaatgttatatttctttcttccaatgttatcaagttaataaacccttaccttagtttataaagtcaaaatttactaatgtattgaaatgagaaccgaaatactcaaaaagaaatcttaaacatcaaataataacgagggtaatgaatgaatggtcatggttatggatggtgatgatctaatgtaaggtcctatctctttttaatagagagtcctcaggctcagacaatttagggttaaagtgcctataaccagatcagaatcctcagttattacgtagtactcttttaagacccgtgaattaagttataatcaatgattacaacactggtatcatttattaatgtacccttctcttctagggtagcagagatcagtttctgacaccttagaactcttcatgtgcaagaggaaattgaaacaataacaacatatttaggcagtaggcaaaatgatttgctttggctttacctacagggaaacttgggcaatggtcattagacttttttaatggaacttcaagtctgatgccttgtgaccaggtgctaacatggaaaagagttagcatcattgacattctttgattcggaagcacataagaggtagataaggagacaacacaggcgacccacctccaggccaggagaagaggacagttcctggaatgtctgcaatgtgttactatttttgtcacacctatgtgaggccatccatctggtctgaatcaatcagtctcatcccagggctctgctcctctcccagctgaaataatacccttctttcctcagtgctgtcttcaggaggggcgctgctcaggactgcccggacaaggccaattaatgagcctgtgtatttgcaaacgatgacccaggattagacactggagaaaactttctttaaattctctataaactctgctctcctagaaacagtacttgagaaaaccggatgaatcattagacaaataattgaccccagaaagcgaaagactgatgctacattactttgcatacgtacatcttattttttaaagaaaatgtccttgccttgaatttaaaccatgaattggtctgctgttatacccaaagtagataaagcctgggtgtgaggcattcaccatgacttagcctgaagtattttcttcggccacttcactctcctccacgctacatgttcaatttccctgcacctctgtaacaaccctacacctctgcttctagatcatcttcttggcattcctcatgtgcacatcctgttctctagcagtcccttatccatgccgcctcatcagattcctgcacacctgacagcctcttgcttgctatttcagctactagactactgacctctattgtacatgcctgcaatcccagcactttgggaggccagggtggtaggatggcttgagcccaagaatttaagaccagcctgagcaacatagtgggaccctgtctctaccaaaaaaagaatcaaggtatgcaccagttaagccagccacgttttaggaccacatagcactcttcccacaagagacctcaaaacttaatgacactggctttggcaaattcaataccatgacataaaactactcattttccctatctgcctagttttccattgcagtgggaaataccaccctatcgtggacctcccaaccaggaaccccatggttatttttgtctcactgctgtctttctcactccccacaaccagtctgttaccaaccgttgctactttttctttgccaatgtttcctgaatccacccctttcctttccattctcatagttgtggtcttagtctaggctttggccttggcccatggggactttgcagccttctttcccctctcccaccacattcacatatcaaattccagcttactttatttaataacactgacaaatttttttttctcttgtctatgtttttggtccattcattctctctgagctccattgagactgccagctgctctctggactggcttctaatgttcacttcatacatgtcacctcttcatccagctacctcctaattgttccaatctttttttctttctttttggaggtaagctcttctggtacttctttttttatcgttctcacacttcttcagaaactcttctcatggtatacatgttcctggtacacaccactcaagggcagattctgacactttctttcggtagtccatccgtgcttcctttctgatgtagcaaagtgtcctctttgtgagcacgcccaggttcaaaacttccatttccaccacttgctacctatgacattgggcagttacctgacagcacttcacctcagcttcctcatctgtaaaatggattgttgtgatgagtaataagatcatttatttagagcactgctggcacacagtaagcactgttaacatgtttgctattagtattattatcatatctcataggactccccaatcacaccccgcttcaatcaccatcatgctgtatgccatattatccttgcatgtaaattttgaggaccacataactgggttttaaaaatctggttctaacagtagtttatgtcttagaaatcagggcaaagttaatcgaagatacctaatatcaaaccaggtaaagatgaagactttaaatgctttttgaggatgattataaagaacattatgataagaatgatgatgatatgatgatgatgatgatgatgatgatgatgaagaaaacatgaccaaatgcttctttgggttaatactctgcttataaaacgaagtgtccaggaaacatacagtattcctcctgaaattagtttttttttcccattaaatggaaacatgttatgcataagaacatatattgtgcagtatgcatgagatttatttttcagaaagcagagaaatggcaagaattttaagtgttctacatacttatttagatctcacatcaggagataaaacaaatgaaaactctgacttgttaataatttacgttttggtggaaaattcatacaagctgttaagatacctctaagacccaacacagaaaatgcaaataacatatatccactgtgcactgaagaaaatttgtctgaaaagaaaataacatcaattaaaaaaaaaaaacacaagtgatttcaagggaatgttgaccacatttacagggctgtaattgtgcttattaattttagatgtctcttttgaaatattcgtgtaaatgatctctccacttaccaggtgtttcttacagaaagtccactgggctacctcactacctaggaggtggcttacaaataggggatttctttttagaaagccacaccattacttttctctaacagcttatgcaaaagttttgtgggggagggaaaaacccaagccaaaaaaaaaaaagaaagagagagagagagaagagtgtgcatgacaataactacctctgtcccttaggtttttgttcttttcatgtcatggaactttttagctgtgctgcctgggtaactgctctggaaggttggaatatctgttgttgaaggaggtttgtgattgagggccctctgacacaaccttttgttgcattgaggtgtttgatcctctttccctttcttctaaaaccaatcccatccctttaaaaaatggataaccagcacttcttttacttattgtcagcttttggaaagttactctgggggtttgtagaagtttaactagttaactctttgcatgctgatgtcctgtcgctaaatattcttcttctttctaaacaggaaggattttaatcacttatatcaggtaactaccgctgttatgcaggcatagcaagtgaaacatattaaggtccagaaataaagcatttgtgttcaaggtcttcaaatgtgagagtgattcaggctttgcaatgagacacatccttattttctttttgtcctagaaccgaaacatgtgagagttatgactctgccacttgaaaaaacatgatgatatactaatttttcattgaagaacaacaggctttggtaataagtaaatgcaaagggttacttcagaactggggtacataactgaatggcaacaaagaaagagagccttagaatgaaaagtgtaggggtcttgttccagtctgctgactagatgctggaatatttttttcccaaaagaagggacacaacccaggctctaggaaagaaaagaagcttaagtggattatttaacaaaaaagcaacttatggcttctagatagtgacctacattctgcacacaataatgatgttttacggtggtgatagggttaataacctaacatcattcatgtagtgttttttgaaaattgaattttactgctacaaagtaaatgtaacagccctctggagacaatattacaggcactttattgtttgctaagctgatgtcatctttctacagactgactttaaaacaaaggcagaacatttattacaaatatcactgtgtgaaaggaaatctactgaaatattgtttagaaggtgagctgataaaaaagtattaatacttggctttgatcatcttgtactataaagttatgacttcaaattttttctcatgtgatctctattcaaggcaaacttcatcctggcaattcctacctgtgtctctaacattatttgccctcaagttgaaacatttgtttaagattcatgcgtgttttaaatacatttttactctctaaggcaatttcttaacagagttgatgagtttttgagagagagagattaaatagcatctttcagagataatatatgtatgattttaaaaacaaagtatggagattaagctgtttagtttatataatgaactttcaaaatcacctgtaagtggtgactgcaaagtttgcaatttaaataagctgtttcaggcactgccaagcaagcattctgcatcacaggttgcttgcaactcagagggtttggtctctgtatctgatgcacgtgtaatacagcgtgaagttgtttgtggatcacacaggagcttcttagagcttcatttccacactgtaacccttgaaaatgtatcaaatgagcagatgcacttggctcttccttaaaaggcacaagtaatttgtttgtaaatcagttacctttcaagaaaagttaaattagggggaactcttgtttctttgatgttttccctcttagaaagccaaagagcaaattaatgatcattttgaagtaataatgataatgaggaaaatataatttagtgagctacactatcccaaaataactttttcaggtacagcatataaataacagcccaaaggactaaagcagcctgatggtgtttttctaagaaaatgatttactgctctgcctttgtctctgaactctggttagaaggaaaacacaggtcaaggaaattgggttaagggaaaaaaagcctgttatgggctaggtgtagaattgtatgaatagtgactaattgggagtctgtagcactcagatcagtgtgtgcaatgctcagtactggctgatggtatttatatcagtcaaaaatgaagctggatacatctttgcgtgctctacgaaggcagtgtgttagttggtgaattggccgtgaccaggagaaagctaccagtagtactatgattgtgactaaaccaagaactgaactgcaatgttttaaaaatttattttactaataagtgtacttctgtatagaaaaatcatttttaaaaaaccttacaactattttgaaacattttactataagcctgcctttgatttgtttgggaagctattttatagtcactcaattcatttattgtatttgacaaatattagctacttaccatgtgccagcaccaaaggttcaaaagtgagtcctcacagagccttacagattagtgtcagaaagaactgcttggcaagggtaagagtgtgacacattgtgagtattcaagaaatgtttgttgagtgactgatagaatgaattgagggatgatcaaggtaagtcctcgatttgatatatgtacaaggaggaactaagagtttccctccctgaacaggtcagaaaggacatgcttgagctggccttaaaaaaacacctgagtggcatgtagcatgtgaataatgaacaggaatgagccactggtggtagaaacagcatcccagaatatgctctgagttttagcagcacagcccatttctgacccctgcatgcctcaaagccactttaagaatttggtctttgcccttctgtcctcaccccctgttgtactgtaatacacgcaaacatgtgtgtgcatgtacacacacatgcacacacacatgtgctaactccatcgttggaattcgactgtccaccccttcaagaatcaaagcatctcctaaaaaaaggaaatggcatgcctgttccttacttgtatccataaaactcacatttgagttgtctatcatgagacctcagttttttgaccaaacattgtccttaagcatcagacacataagaaaaactggaaagaggaacaggtaatatttaaatcacccactattcttgtaatgaaaggatttttcaaacatcaagatgaaatggttttatcaaattattaaagtttgctttttgtgtccaacttagcaacaagtcatggatgggacactcaaaacaggccaatttgggacagttccaactgtaggaggccttgtgtcattacctctataaatggaatcgagcttcccttcttctgcagctatacattttcttgcctttgatttcccactctgctttctctcccggcaggctcttcctgtctcctctatcagttactctataggcagatgtgcctctttttccatttgccagatccccccaacccagatcttccaaactactcccctttgaagtctctattaccgatacaatcacttttgtttcccttccatcccctctctcactgctccagtttcttctctccctaaccccattagttacatctgctgcccctaccattcagcctgtgttaaatcgtaatgcgcttgacataacttcagtttgtctgctaagtactcaatcagcacgcattgctatcttctgatttgtaggaaagggggcaagactgagtaagctggctcagaattctctgagtgattcagctctgcccaattagcacaaccaaagtgggaaattgacaactaataataatgaaagaaatgggttttagttgtgaatataaatcccacaaacttggttcctgatgcctgtggtagatactgtatgcttcatatggtggtcagatggctcagagaatgcagaagtggatgaatgaaggagagtgtgtcaataattgcaatatttattagttgactgggattctttccctggaattcattaatggattttttaaagactctgcaaaccaccagaaattgtatgtaacatttagtatattgatgcatttttttcctgggcagtgggtccatacgtttaagcagattcttaaaaggctctatgtctccccactatccgcctccaaaaaggtgaagaatcattgctataagtgaagacacctatttggtctatgttttcatgtggtctgctttttttcccagcccattttaacattccacatgatttgagcagttcagagagtagaaacgtagggttttaaaggcaaaatttaccttctttaagaggaaaaatgtttaaaccacctaccaggttatacaattcacattttaaaaattattttagttttaccacaattcaaagacaggcctttttttttttatttaacaatgggtataatcacacatctgaacataagaattagttttatgcagttccatagaaaaccaaaatcttgaggaacactttcaaaacaaccagagaaaaataaaccattccttatgtcagtcttgttagggagggattaagaaactggcaattattttggcgaccttaattgttgcgcggcaggaaaatatgtaattagagcacgttcccaggcctgcacacctgcagcacatcctacagcataatgtcagctttcagtgcctgtcggtgccaggttctagcacaaccagtcacagtgacgctctgagaacatttcggactcatgtaatgtggcttctgtgtatgaaagaagcaggcatttacactaccacacaatggagtgcattgctgcaacactggtttcattattttctgacgcctaccttcagcactgccctggtttactccgtttgaggttttattgttacggtataatagtcctgtacatttttgaaattcccttattattcagcttattaatacagtactgacttgattatcaggctgcagttgcacagcggaagattcagtgcattagctaagtcagaagctgagtaaattcttggtataatgagaacaattgtttgacatttttttatgtagaaagatgggccatggtagttctctatatagttgcattttggaattcactctatattccctatatgttgttgagtattcgtttttcatataaagaaagcttaaaatgtgttctcactaatttgaaaagtgtttcagggtatgggaggactccatcatgattctcattagcttttttcttctttttcttttattggcttttctcaacaaaaagaaactctgacgttagaaaaagtagtgaaaatgaagaaacagtatgcacgatgcctatttttcagataattccataatctggcatagtgatagttaacagacttttcccccctaagggagatacactgtattttgctatctgacatgttgtcatatataaagaaatcaattggtaattaaatgatgcaccttgtgaagatgacaaaaggcatttggttgcgaaaagagaactgggttttgaggggtttgtagtgaaggcctaatgactattcataagagattttcagtccgttgatccacttgactggaaagttctgccctggagagttagtgctgtcagtttctctcacctcagaaagccgccgcaatcgacggtgtagaggatgagcgagaaattatctagtagttgctctaggcctgtcttaggtcacgtgcagaaggcacatctggcttcctgtaggtacaacctcaggacataaactttgactaatttttaaactataaatatgtacgagtgacactgaataagttaccttttattcatatttcctttattttagaatgcatgcaagttgtgtagtaagctgccattttggccttatttttcttccaattttaactgttacacacttgcttgttaagctaagagtgactgtttatgaaagttgtcaaggaccaaatgataacagtctccttatgtgaaatccaacaactctgtgtttgctgagaatatgccaaagttgccctgcaggaagctcacctgaaacaaatacagagtatatgattggatagcgctcttggggggtgtttattgccctatttggcaaaaggcagtaagatatcaaaatgtacatacataggactggatacaaggctgccaccacatcaagatctctagaattgcagaacattgttgctccagtgtcttcataaacacaatcacaaaaactacgatgaaaattcatgcattcaaaacagaccagttactgtccaccatggaccaggcaccatcctagctttggaggagacaaacatgagggaagtaaaatctcagtgctcatagtttactgaggaacagacaaataagaaaacagttacactacaacatataaagagttatgattgagttgtataatagcacagagtttagaatccaggaaagggttttctgagaactgttggggtctacaaacggggtaaagatttcttatacgagctactctttccattgccaaagccaaattagctggcggaaaggtgagttggacaagtgaggtgtttctgttgcatgtggaatctcaacagaacagtagtggccagcaatttctgtacatatttactcttggaaagtgcttctccatgttatcttatcaagaagctcacctaatcaaaggtaaacacatttatcgcctcattaaggcttgttttatggccacttcgatgtcatgtttgaggtagaagtacctgtcacagtctttgtctggaatgtatgtaaaagggatttcatggacactgcagaggttttaatctttcaatatcaaaataatttaatgcataatatgtatttgagaagatgtcactggtgattcctacttgtgtactgtgtgtactgagttttgctgacacatttgctagagctgtcaaggtggaccaaatgaatggacagatgccaaaaaaacaattatgcttattaatgtacattgattgcttgtttaggttataaaacaaattaaaaaaaaccattagtatttaaacccttttatagctgagctaatgattgcttgtaatatagtgtctggtaaagaatattctataatacctgtaaagcccagctatgttatctaattagtagactttgatttaagtggctgtaattatggaattgaatagttgcctttctaaataaccaaatggtagatttaaatatataaagatgttgacttgattatttaatatttgtagcaaagacaaaccacctaaatagagagattaattccacatcagtgcaacattaaaagggagagaggatgccaagaatcccattaatttgggatataagtgtctgaaatttcctcaaaacatttacgccaaggaataccaacaagacaatatcaagcagctctccctaaggatagagaggtaaggcaaacatgattttaaactgcacaatatcacacagtaaaattaaggacaatgtgttccaccagatgctaaacacagccatttatcgagctacaaggttctagactaagtaagtgttttgtatacatattagctccatattacctccatgacctctttccccatgaagccttccctgagcctcagtatccactctttcctgtaccatgaatccatttttcttttactttttcttttctttctttcttttctctctctctcgcttgctctttctttctttctctctctgtctttctttttttgttttttgttttttgttttttgttttttgagacagggtctcactctggcacccaggctggagtgcagtggcacaatcatggttcactgcagccttgacctcacaggctcaaaccatcctcctgcattagcctcccaagtagcttggaccacaggcatgcaccaccatgcccagataatttttttttttattttttgtagagacggggtctcactatgtcacccaaactggtcttgaattcctgggctcaagtgattctcccacctcagcctcccaaagtgctgggattacaagtgtgagccactgcacccagcccatgttttcaataaagatggtgctatttgaaactatggcatgtcacgtgtatattattttatttcaccatgtgtttaaatgagataaccaggtgccaagaaagcttcaatatttgcttaaatagccaatgtgacggagaataggtaacctcttttctttttttttcttatgatttgctttggctattagttttgaaacatacatgttatattcccaattagatctcgttacatccttcacaggctgtccaaaaatttccatacttctaacaagaacttcggttgactgagtttatattatatagtttttctgtcctttgccctatttctttcaaggcctttgagtcagaagcattcagcaccacggcgtacgatagccaccatttgctttgcccttttaactttgggggttacttctgaccatagtccaactgctcagaagggctttttcacaaattgtttaccgtggcagttgctaccctattggggtttgcattcagaacccataagcagagagcaatggtgtcagtataacaaataatgtgtacaattttttaaaatgctgaatttaccaaatccccatattatgttttcacactgctctttcagaaactgtgctaatacaatactcctataaactgatcttggtcctggcaggccctgttggaactaatggggcctgacagttcttcagttaaaaattatacatgagggccactttcccttaaattatctattgtatgccagctgttcacaactgcactgcttcactttctttgcagtgctagaaatgtctaattttctcataatatccatagcaactattctcatggagggcattgaagttagtaagacttcaaacacaccttcacagaaatcatgctagagttgcagtttccattttctttaattttttggttctgaaaaatgtttagatggctcattttgccggtttcatgccatagcacttgagttatatcataatttctcatttgctgcacaactttattctatttttatgctcctaaatgacgcagctctaagtacccgtgagtggcacttccgtgctgtgagtgctatcaaaggcaacctcagatggataaaactcctggttttttgttttcttttgttttttgttttgtttttgttttgtttttgctggggaggggagaagcggagtcatcaccaagggccttcttttgtttttcaggcatgttaaaactgtataaccaacagaaccatttaaaaggaagaaaaacatcacccaagttccgtgtctgaatgaaggctgtcttctcaaatgctcctcattactccagagcagttatatttggattataattaaaacgaggcttcttttttttcttttattcttcttttttcccagaatgcctcaagtgaagtattcctcccaaagttattgcacctctttactaacaagtgctgggattttaataagcctgtcccccctccttaccctgtacagaggaaaggatggcaaagagtggctgtggtacaaaggttacatattcagtgatattttctgcttttattggtaaaaatggggaggtgggtggaggatttcctttaattatgaaataagtgtgatgttagtagttatttctgtaacctggtgaaaatgctgcatatttcaggcctaatttttagcatatgttaccacgtgtgtaataaaacggtgatctgcgctctccgaatcttttggctgttaaggagcactctgattataactagttgctgtagaaacctggtcatccagatgcttatcaagaatgcattattattttttaaaccttggtggagaagccacagactgcagcagttggacaaggtcacatatcgatggaagtgacatgtctttcctctttccattgtgtgatcgtccagggcctgggggcattaatatgcaacggttctgtttttctttcagaaggacttgtaaactctttaaacagaggcacacagttgcaattgttgcggtactgagtgggtgtatagaagctagggctgcagccttgtccagttgcagatagaataaaactgacaatgatgcaatgggcctggcatgtagacaactctgtgggatggatgaatggtgcggctctcgctgtccctccggtggtggtaggccctgtaatagctagcgtaggaagggtggtgaaaattgatatgcactattactacacgtataaaacttaacactggggccattgcacaggtggggggttcctgtttattgatttttatgagtttgttagaacatgcgcttaatgcttttatactccgggagctctgggagggctcaccttaggtaataaacctttccgtactttgcaatcgctcacaatttacatggggactcacattatccagtacaaagcccagcattccccttctacttggttttaggagtgtgataaaaaaaaaaaagaaaaagaaaagaaaataactatagcacttactttgaattttttgaaaacctgtccactcccgctatgaaaatggcccctaattctaattactcatatttccaagaaaaattagtcacacaaacttatgttatgtgttgtctcagaggttgaaagcaaatcaggtttccaataagacagtacatcaaacaaagtagcatgttcttgatgccgatgacttttttttagaattatggttggacatttttggcagacagattgtcttttgctctatcaaaatgacagtttcttttgtaactgcaacattcataattagaaggagagaagcaatctgcccaatttaatatactaaaagaagtttagagtctctgctagtaatttcattatttttaaatttgaattaattgacttaaaataatacagttaagaagtataaccagcaggattatggagaaaggtttctttttccttaaaaaaaaacagtgctctcagtgttacacttaagatgagattgaaattttcttttttacgccaggtgccccgttctaagattcagagcagcaatgtgaatattcatccttgcagtggagctgagagaagttgtagggcaaatcctgggaacaaggtcactttaaacaaaaaagttctccaagtttcccatgcttataaggctggctgggcttaattaaagtcaatggatgaccaaaaaataaataaataaatagagagagagagaaagaaaagaaaatgaaagaacaaccacccaccccatatcagtctctttctaggcctcacttcacattgtataccttagccgttgatgttcaagctctttacatagatcaagaataatatttcttaaatcccttaacaacactgacgtgtccatggtttaatcactcttccccagtccacatctctaacctacgtcacttgggtggccctcacccacagcaccacaacaaaaacaaagccagaattgcattcagaatgaaatcatcataacatagcaaccttgttcaggatgtgacctttgggtttcagcaaccctgtcttatgcagccctggccaaccttaacctttcctgttggctcggagggtaacctttcttcatattttcttcaggatctctccttacgggacccagtatgttgcatgcctatgatgcacagggccaaaagtttcggagtgttaaaatctacgagcctgttttcctctatgagagaatgaagcctgcactcattttaaagaatacatacgtagcaagatctctttttacccttcctgtataattttggttatgcttaactctaaaggaaaccaattctctttagctctgttaccttatttcgtaccttagctgattgtcatctttacatgagcatcagatatggatgtgacaaagattttttagaaataataacgaccagtgctttatgagttgtgaagtgtttttctctcccacaagaaattacaacacaaagtgccctatgcatttttttagtatgttgataagacagcaggaaattttttaaccctcaaaactttctgattataagctgtgctctaaatttacacgggcagtgttccaagtcccacactcctttacaagtatatcattacagacctgcaagtgagaaggtaaatttccccatggcagttctgaaatctgacttcaggctaagaggccatggactgagagggctgattgtgctgggtacctacatatcaaaatctcctctagtattttagtagttccttctgtcctttttgcagccccgtgtcctacagaagtgacattttgttccattttcatttatcttactctccttagttgtatatcaaaagatatacacatttatataacccaagaagccagggattaaagcacaatatttcttaacacagcttcctctaagatctccagtagctacctaatgcttaaagcttgggctgacgtgggttatggggttatagtagctttatagatatttctatttgtgtatgctatgtttatatatgtaatacatatatgtgtggcttagggctatactgacatgttattttctatgtgttcatttattataaacagcaggcaagcagacgtttcacctcacacctcactctggtctctatcattcaaaaaatattgcaagattcccattctaaattaaatacatccgagcttacgtcttttatcaattctttattcttggtatctcaaaattctggtcttcgtcctttgtctcaaaaagggaaactgctgaaagcatttccacctggatgtttaaattatttaagttgcaggaaccagaccttttccctcctgagtagttgtgggttttaaaggctaaaattgcttcatcatgccaaagtgaaagtatgcataaattatttagttaaacctgagaaaatacagacttttcccagtgatctttcaagggctgcctacttaaatttcagaagaatgggcaagatttttttttcattctcttagaaaattgaagtatctcttgtgtcttctgtcagttggaatgtgaacaaaattacaaaatggtaatttttttaaaattccaagcttcataatatccagtatatctatatcattccaaggtgaatactgtgataatcaatcaataccaggaagactcctccagctggcgagaactgcaaaccctctctcaatgtattcttaggaaaatcaggcaacttgttataggtctttccctagtgccaacctaaagactggggggcatttccgattcaatttctagtcatccagagttggtatttcagttttaaaagtagaaagttaggtaattttaagatgttatgaaaactttgttgacatttttaatttgctttttaaatttacctttacttcagcaaataaaaataccagaaaagtgtgaagttgtgtggtggtggtggtggttggggtgtgtgtgtgtttgtgtgtgtatgtgtgtgtataagatagataatattaaagtagcaatgaaaacagcccagaaatataggcaattgaggcccaatttcaagtttctgtagcataaggcatgtatattacagaatgtaccacattatgtatctgatctctaaattcgccttagtataaatgctccaagtacattcttatgaccaagaaaagaatggtatttttaattgaatacctaacctcaaatcctgaaagaaacattaattgggacaggacaaaatgtcaacaaaaaagtacttatgtgagttatttagtatacagctgtctgttcatttgtagaatccatttgaattttatgttcagagaaattgggagatgagagtaaatatggggggagattggcatgtaaatttgttgagttttcatgaaaaaataaaaatttaaaaaaccttccaagcaaaataaaacctgttccattcacaaatgatggatgtcactgatcccattaatacctgttacataccaggtcctcttccttatatctaacttgctttttctcccaatttcagtgtagttgctcttgaccttgcctttgttcttctctcctccttctctcttctgcccaggcacagttatgtccactaaaccagatgaacaagatttcatactgacaccaccatactctgttaaatagttaaaaatcctattttggcttttgtttgctcacttagatttgtacacccaaggtgatgaagagagcacagatagaatctagagacaaatagtttctggagtcaggaatcagatccagattctaacacgaggtgatgtgggaaaaagtcagttaaaatttctgagattcaatttactcatctataaaatcatcctcataataattgctccccccttcaaaggtttgttatgaggagcaagtggaaaaatgtctattaacgggctctgctgtcagtggattaatgcataaatccaggtattattatataatcaaactgtccttttaaatgtagaagaaaagggtttttaaggcacacatgagattctggaaacgtagacgttatagaaagtctatagggactaaaaatgcattgtcttctatatgcatttatcttgccagaggtacatgcagacctttggggggtgctgctctggccaggacagtggtggagagctctgactcttgagtgtgagagctggaacgattgagaaaagacaggagggaaacttcgaggtcaggtgacttctttctaactacagcaggttctcagatccctaggctggcccaagatgagagaacagtcaccaaagagagtctggcacagtaagcctaagtctcagtgtcatctgattgtgaaatctgcttgtttgcatactcatacagtaccagagcttaagccctggccactgtacggatgactgtacaagagcagaatctaagaccaaggggttgtttttactaaggaagaaaaatttattagagttacttcaaggaaatctattagattatctcaccaaatacattaatagcatcaattattgtattttacataattttttttacaccagatacacagtatattaaagaatttgtggaagtcccccatgtgaaccagtattaaccatgataagagtaatcaggactggcccaagaaaggtagaaatgagaatttataaacttgtctaattctcattgcttgaagaaaattgaaatgaaagaatccaaaaagggatttatgaatattttttaaagcttaaaaagcccacatacttatcatcgaattgtctgcttacgataggagctggaagagtcccttatatccactcaactgtacttacattttaaatggttgttttcctttctcttacactactacaagagaaaggaaatgcctaggcaaataaactcagttaaaataactttatggttgtgacacagtttgacaaaagcaaaggaaattcagagtcactgctcacactgtatcctcagctgattccaactgtggaaaataaaatgctttaaaaaaaaaaaacaatggaacaaacttgggatggatttagtcttagtcttagaggcagccttcttaaatgctgaatctctgagttcgccatctttaagttcttataagagttgcaatatctgtattcatcataaatctagtcagagttaaagaagagtatttggttaagtactgcttggaaaatatgttgtccttttttaagattatgtgattctaactcaaagctgtaacttcttgggggttaataacctaccttgagatatactttaagtaataataatggcttcttgggattaggaaagatattaaacttacccatttccaacgatcctgtactattgcaggagagatgtggggagggagagaaagagaaagagagagagacgagagaaacattttgaccaaaattccatattcactattgctatgcaaattataaacctaacagagaggtgatgtatcatttttattaaacttatgctgcacaaatagtgtttacatagaagagtataaagttaattccctcccgggaagcatttctaaaaaatataaattgtattttgagagttaatcaatttgttttttctcttttggcattttaattgaagcttccaaaccgtatgcttcctcaaagtatcagaaggcaaatatcagtcgtgtggttataaaatcaactcttaattttctttcaatgaagtagcagatagtcagcttgtaaattttacctacattactatggagctgcagtgctataaattcaaaacagtgtgcaggttggtggaaattgaggtccaggcagcaaggcatgtccataaacttttctcaggttattggaacagaacgaatcaaaagcggttcctggttgtatgatattctcttttgatagagcaggctgcttgttgttagcaatccaagtgcagaggttagtcagagcagaatgtaatttctagcaatctgacagacctgcggattgaagcggcaggttttcccttccgatttcagggaattgcttcttactgtgacaaatgattagctgttatctctgactgaatttgatttctacaagcagctgagtcaggtaactttgcagcgtttgagggggttttttacaggaaatgaaatcggctccctagtcatatgtggaccaaatgaaatcttctctgtcagggcaaaattgtgcttttggttaattgaaggcagatttagcatagagggtgtgtgtggtgatgtgtgtgcagggtgtgtgtgtgtgatgctctgatggtgtaggcaggcacacccatgtgtgtacatttacaggaacgagggatcatttcatggattctctcccaactttgaaaatcctgggttcaaacaaaatccctacattctgagcagggttgaagcttttagaataaactataagtggagacagtcatgtgggtgtcagaataatgagccttcatataaggacatcctgtttcaaaagagtttgaactgcaatattaatcaaaacacaatagatactcactgagcatggttttcacaaaagtattcatcaaagggcagctgcattcaaagcaagagatttaggtaaaataagttaatccttgatctcatccaggtttgtgtgtaaattttgaatagggaggggttctagtgatagcaagcgtcctctggatgataaaacaaaaaacgtggcatgggaaattccaggtttatcttgtgcttcttgttcgcttttgatggaatcttaatagtgactacacaattaggatcaggtttatccttctgtttatagtttgtaattgctctggaaatcctgagtttcagtagttcaacttttagtttttaagcagtcggtgagttttttaaaaagttactatcggataatgtttcatagtttctaatcctattacagcaatgtaaaataaactgtatttcccaaatacgaagcaacatcttttattcccagacctcttactttgcaaagaggaaacaccatctttaaggtcatactagtaatactccttattttgtgatgaacataatatactttgtttataaatcctagtttaaaacaacagagatttgtggtaattgacgaagagtaaaaaagtcacaaatactgaatcttcatttttcagatgtgagcacaacattcctaggtatgtactaatatattctaacacggcattgcgctgtcatcaagacttttgtctaaatgtcaccactattatgagcaatacttttgctaaattctttagttgtattccctaaatggcagatacctttggacctctctctcattagctattaaaaagaatagttctttgaaaataacagttctgtgctccctaaacttcttttgttttttgttgagtgatgtcaacttagagttccacactgattgcccttcctccttgctttgtcgccacaaaaggggtgagggggtgccggagtttgacccacacctctggttagtattaatcacacagacatcaggtaatcacctaagtgcactcagacatactaatagaatgatttacagaccaggccctttgtgtttttctaaatctcattttaatttatttaaagtgacagtgaagctagactccaagctaatgagtctgcataaaaatgatttctttttccacctttgtgtttgctaaaactttctgactctgaaatcctgtcagtgaaaaattatttgagatgaaacactgcaaaagaaggtaaggggaaaggagacaaagaatatgatttgatcatcagagacctgccctgggtccaagtgggcctcatggtagccacaagtgtccagatcagacaaatggggacttttgcatatatgttttagtgcttcatccagacttgagtgcttcacagagtctgtgaggcaactcacatcctttggtagctaacaaattggtcctttctgaccagcaagcagtttaagaaagctaagctgtgttgtatgcgtattaaatatagcacgaactgcttggctttgcttaaccttagttgtattaacagattgtttgttttgatgactgcgccgttagcatgccagatgataaggaaatggttttggattagttaggacctataatatagaaactaaataagatgatagacttacaaggatatacatttcctgtaaaaaaaaatgaattcccttatcaggatttacttgaaaggaatatgtcttattacagaaggagaatgccttgaggaatgtgggaaagattaaaggcttttgtcagtagtttaggttgggaccaggtttcctgtgtagccagcccccctgtccccacgtaaatgttttgcttttcctcctctctctctttctctttaaggggaagagtaagcccttctcgctgcctggcggtgtcagattaaataccgagatggcgacaggaaaaaggctggaaggaaaaacaaaagacaggggggtgagagttatcaggttggcgacggaactgcaggcttgtcggactccaatttacagaaatccaaacagattttagttgacacgatctgcaatcattaccgccggagcagagctaattaagaaattagctttcctgattgcctgttctcacagtgatgagtagttgaataatgttgtatggctgaaatgttctaaaaccagacagtttaacaagtgtttagccttttgtggtgatgctgtatttactttatctataatatctgtgctgcatcactatttgtttcctctccttagaagcaccccttgactttttttttccttttccttggttcaccctcttcttcttggcattaagtcagagcttccccccttacttcagccgcgtataggagagaattatcatacagatttgtggcatgtggtacagaaaagttatcggaaacttgtggcacattcaaaagcatatttcctacccgtctaggcatttttcacaagaaaatatcaggtccaaagtggcatttgaagtttctgaatctgactaaatgcagaggtgattgtgaataaataacattaaaaggctttagtcagcaaagatacagtacgagtgagtggagctcattagaaactagccgtggaccccagatatgtcaaaggggggtttgctgagaggtgaccacgcagtcttcataacttcctcatctctcccacaactatcaaacacataggaagatgttatttggagaaaaaaaatagttatgtttaaaaagcttgacaaagaaattaatcaaaatgagcttcatggaccttgtaaaatatggtccaggcacatgtaatgcatatgtaataggcatgcgtaccgatgtgtccatatggacaaatagaaaacccaagagttaaaagtttctgcaaaaagacaacaacttctttccaaattaaatagaaggcttatttgaatataaactttctcgcaatacagcaaaataacaaagattggacaaaggtttccaggtgtcactgttgaaactgcaatgggaggtaagagtattgctagcttcccaaatgaaccacagaaggggaagttgcatcattcaagatgcttatcctttaggatttccaagttttaaaatgtaaatattcatctatggaaaaaccaaaatttccaagttttcctagtacaccttcaaatcatttctacacctaagaaaaataaatactaatttttcttaatgaggcctaataacacctttaacttaccaatttaagagacgctaagtcaatacaatgtgcaggtcccttctggatatttattttcctaagcacaaattcatttataccgaaaaaacagtggatgaaatactagaaaaatcttttctgcactggacctctcttttccagatttacctaagagaatcttaccaggaatggagatagacttttacttcctaagtagatttaaatttaacaccaatttattcactctagtatttctatatgggaactaacagcttctataggacctctacaaagtgccagaaatatgatctcatgtgtagtaataaatttaaatgtgttttcttttacatattctatccctccgtattttcccaatctcttccttttttatgactcccccactctcagtttctaaaatcacttgtccactccggagacccaggggcactgcctagagaaggagctaactttaaaaaaaataaaccaggctggtcacagtggctcatgcctgtaatcccagcgctttgggaggccaaggcaggcggatcacctgaggtcaggagtttgagaccagcctggccaacacatggtgaaaccccatctctactaagaatacaaaaattaaccaggcgtggtggtgggcgcctgtaatcccagctactcgggaagctgaggcaggagaattgcttgaacccgggaggcggaggttgcagtgaaccaaggtcatgccactgcactccagcctgggtgactgagtgagactccagctcaaaaacaaaacaaaacaaaaaaagcaccatactcagagctgctataagtaacatgcagttgtaagccacacacttctttgcatgattcttattttaaagattggaaagtagaattcgtatttgtttgttgtactaattccagtggtatacctggaattaataaatggtactaagacactaaggcgttactttcttgcattattctaaatcagagtgttgattagagagaataatccaaaggtaaaatagtcagataatttatttttatgtaagtttaaaaagagaaagagattgatttttttgaagagttataattacattcagtatgtaccttttgtgcattgaaataattttagattttctgaaaaggaaatattgatgtaattcagctctcaaaacacttgatgccatgcctttcttcctagtgtttatgtaaaagcaagtggtcaattgtcgctgcatcagagctatgacaagttcttctatattaggtgggcatcactcaaacacttttccatagtagatccagtggtatacctggaattaatacaatttattaagtactaagctatgttgtatttattgtattaattccagtggtaatacaattccagtggtaatacaatgtattaattccaggtatacctaccactggaattaatacaataaatacaacatagcttactactcaagtctattacacgccatctaaaatagctaatcagaaaggctgtatgtctgaaacacccaaaagtcactcatcctctttcttaaagcattaaaagttttggcaacttttctgaatccgagttgtgtgagtcctatactgtactaagctggacatcttaagggctgcaggttttaatatttacactgccccgactcagttggtaaccgctagcaaatcatctcaccccagtttttgtccttttcctgaagaaagctgaatttggtttcatgatcactgtttgctgaagaagacagtcccaacaatggtccaaagcaaggccagcttttaaaacagccaccaattctgagtcaaggcatctaccttcattctaatcaagaagggaagatacaaagtttcaagaccagtcttcaccttgcactgaatctgacggggtcttactcagccactttccactacctttcaacctaaaagccaagaaaagcaaggatttggattttaaagctgtacttgttataggtgttcatgggttttgttagcattgttgttttttagggatgaggggtgttactggagtggaagggggagctgtgttgcttttagtttgtcatttaggatgttaaagttagtatgggtttcagtttgcattttaaaaattagaatggtaatgagcaaggtgccagaaggaaataacaaagcacattttcctgaatagctccccctgtcttctgtgttcagattctactctgacttcccaacccggcttcctctcccgcctgctcccttctgaggtgcagtgtagaagttcattctcaggtttctctcagtttgcaggacgagatgctgccggccaggccaagggcagttatgccagctcagtgtagtgcagcttccttgccccagcgtgcgcaggctgaaagctcagccagtttctctttctgaggctgcttcacgtcttctcagggatttccaaggcacggacgttcatttgcctaaaactctcttaaactgcctgacaaaaaaaataagtacctaagtacgacataagtggtacacccacgcaggataattaggattgatgtgctcttttagaggcaccagatcctcaacctccccttactagtggcatttctcacctgctcatgtggtgcccacctgtggcttgctggcattgccactgcctgcgagtggggagatttccaagttcaaaatgaaggcctgattttacatggtggaacgctgtaggactgtgtggagctctgtgaaggaattaaggatggcatgaagtcctagtttatgtcactgctcccttgtttatgttctttccttgactattcccacgccccctctccagattttgcatggcttttatagcctctagtaattatatcagcagcatggagtctatttttatctcttctgaatgtgtgcaacgtaaatgtcaaaaaccataaaggccctttttagcatgtaccttgcatgcacagtttgaaaagtgtgatgcagcgttcagagagatgttgcattttgaggtgagacagatgaaaagtggaaaactcaatttcaccacttagctgcgtgaactttcagtaagtcctttatcatcttgaacgtttagcattttcttctgtaaaatggagtccggctgcctacctcatagggtggcagcatggaacctagtttagtgtctgggatgccccctttccacagcaggtgcccccaaactcctaaattatatatttcatgcttaaatgtcatgacctttcaatgccctgcattgccctttatccaacttagaaacggagtaaaaataaaatcttaccactgtaagtcacaataggattgtcacaaaattagcatgtgaaagaatgatacggaactcactgtcaccaaaaaactgtccctagacttggctaataattataataatacctagcatttattactaagcactttctgggagctggtctctaggtgctttacatgtaaccttcacaaccatccactgacccagtggatagatattcttgtcctccacttaataaaggaggacatggaggcaggttagataacttaacaaaagtcacaagttaggaagttagtcagctggattcaaattgaagcatcctgatcccagaacctacagaaatataaaatgtctatcaggcaggagcattcacatggctgagctgccccagcttctaggcaaggttgtttcctctctttgcacttcctatttgaagttgggccctgaaagcggctagatgggcccgtcagaagggcatgcgaagctgcagtcccttactcagctacgagttagggaccatcatgcttcaaaggggaaatggcctcagcatgtttaggtagtccagtaccatggtacagtttttatggctcattaatttatctttaattgaagataagttgggagaatttagagttgtgagaaaatgtgttgttttctagtcaaaaattctcctgtagttgtgatgaatggacaagatgggagtaactgggggatgtggtaagggataataataaataataaagagcatatttgtaggccctcaacaaaatctagtgatggaaggaagaacatatataggcatgttagacatatgagaaatatcataatacattttatgggtaagctaagaagaaccagttatgcaaattttctctacttttttatgaactacttattgattaccccagtcatttttccattgctaccactgcataaagcagaggaagccagtgcagtcagaaccctcttatttatacagtaaaggctattaccgaccaagtacttagcagccagagaaatcttgcgtgtaaaacagaactgggatctgaagaacttagaatatgtcatttaaagaaatatgatcactggtatgtactaaagtgctccaactttttaaaaactttaaaatcagttgactgaaatttacagttattaaacttaattcttttttttttttttttttgaaacagtgtctcactctgtcacccaggctggagtgccgtggcgcgatctcagctcactgcaacctccatctcttgggttcaagcaattctcccacctcagcctccccagtagttgggactacaggtgcaggccaccatgcccggctaatttttgtaatttttggtagagatggggtttcaccatgttggccaggctggtctcgaactcctgacctcaggtaatccgcctgcctcagcctcccaaagtgctgggattacaggtgtgagccaccgcgtccagccaattgttagtctttggtacggtgcccatgagtcatcaaactcatatgtggaagtttttgaaagaagaaaaaaaaatgagagtagattgattaatgactattaaaaatagcctgggatctacgaatacccatagtaaagagcaccaggcactggatagataattggtctaaagagcctggaccttgctgaagataatatatacatgtaacatgttttgtgaaaatggagtcctgaagatgaaaggtgtatcttttccatattgactacgtgacttaattgctcacttactaggctgagaaaggggagcagaggggatgtggagagggaagaaggagggaaggaaggaaagaaggaaggaaggatagagggaggaagcaaggaagggagggagaaaagaagggaggaaggaaggatgtggaaggacggaaagaggggaaaggatgattcaatatcctttgactactaacatatggcctatttggggaagtagacgatggtgcatggagtctcctgaaagcatcatatgaatgtttgaaaatgttattgcccacacagtgcaagtgcatttaggtatgttttaagataggtgggctaactctgaactagggattcccaagtttaactgccttatgaaggttagaatttgagcacttaagttcagggaaggaaggaaggaagggggagagagaagaagggagacggcactgcaggtagagtatccccacatgtcttacctcttctgaaaggctgatgcaacaaatgcgactgaaaagccaaagtatggatacgttttcaatttatttctaaagagttcaatttaataactgtctgagactgaaaccattgacacagcagagcttctagtaattataattctgagattccccaaagtggaaagtcctaggaatactgcctgaaatgacagtgcatttgctgttcaggtaaaattctttaggaattttctctgattctgatttctatttctaaaattttcgatcatcttcaccattttcccccaaaaaatgaggggtgcatttctgtcattttgtgtgtggttgggtggtattgttgcgtctcagttaggggttgtgaaatggaagctctggagggaggaaaggcattcttggtttgcaactgagagcaaaaggtaccacctaagcatcttctgtgagactagggtgcttcctttagataaatgtgtatctgtaatcagcttaactaagcaggtaaggtgttcattagctaggcagggttttcaaagagagagagagggagagtgagaggaagagagagagaatgaatgtggaagagtgagaagaacaaacaagtcaaagcatttgttcatgctgcaatctacacatcaattatcccgctgtgctaattaccacctttccataccccaggtacctaagcattcacacttactcactttcatgcctctgatcaaaaaaaaaaaaaaaaaaaaaagaggaggaaagaaatgatagaagcaggggatgatgaacccagaggagaaatacattcttagatcaaaatttcctttacatatgaaagtataaataaggggtcttctccatcttgccattgttgttttagacaattaaatatttgcaaatgttttaattgcaaaatattacttactgtcaggcttccaggagtgcttccatctcatcagcccttgtttccatacttaaaagaacacagagaggtgagaattgctggtcttgcctgagattttggggttgtgccattagaatgagatcagatcattaaaagtcagtgactactaattatcaggctacttttctgaggctattcaagaattgggcagtgaggagccagagagctacctttgtatcaaaaccttggtgttccccctcaccgactgaaccttcatctaacaattaaacattctttattatgatgaaatctgggcttggaatccctgttggtttgtgggcttccttgtcagggtgctcattttctcatttcagagtgaagttggataaaaagaaaacctatttcctgtagctcatttgatacctggtggggatgctattcaggtgacaaggatacaggcacagagggggaacagatgtgatttacacactcattatcatttgaatgaaagtgcagataggcctgttcaggggcctgggcatcacctggacagctttccttctgatctttatcccatctgagaggccaggtccccctgacatctttaaatccccgacccccagctggtgacacacagagttttatgacagtcagcagtcctctgaagctccaagcacagatgccattcagaattgtgcttcacactgtttttttcattgtgttcaggcttaatcaggaatatatccaaaaaaagcttaacttgaataatttcttttggtacttctccagaaacctgtttgccactcgaagtttgtgtatagtattctaaagggcctcagattttgtgttcttaaagttatgtgcatacgtagctgcttcagctttcgaaaaaggacaacaaaatggaaaggaccataagttatagatgtcatcaaagtcttatgtttctacgactatcagatcagatgagcttagtattgtggtagatgcagtcagaatgttagagtgcaaagacaatagaaagtttggatgaagctaccaaaaagaaaagtttctgtttggcctcttttgctcttcataaaggattttcagcgtctttgttttgctacctggaatggctgctgtcaccatgatctctcaagcattttgttacttatttgtgggatgtgtgaataacatggaaaaattgctatgtcatctgaagacctcaaatgatgagtcctgaacagtacaaactgtttttttttttttaaatacattttcaagaaagcttgctttcgttcaggacaagaatgcacaacaaccttgaataactttgtttttaaccttcccttatctcaggcagcctgacagttttggtggggagcgaaaagtgaaaggaatctgtgagaacaaatactgtggtgtttcatgattttaattaggtattgtattaaagagaaaaatataatgaacacaagcacatacacattttatttcccatctaacattaacagttaaagaaaacaatcactatcaaattactttgttacagtccataattacaactcaggttacgcttaactgttattaacagaatgtacagtaatatgttctggcatcgtaatatgttattgtagcattataattaatcttacaggaagtataataaatttacagtatcagattgaagcaatactgcatatagatttattaatgcttttaatcagttctggcaaaattaattttgcactgattgcttacattggaatttgcatatacttagtgaaagtaatttattttttatggattcctttttattaaaatagggcatatggccctttagctaaaaaactttgtggattctttagctaaaaacatttctaaacattttgaaatgccatatatcttccctttaagataattctttctcttaagatttatttttaaattatattctttaaaatacttttttaactcttatttcaatgatctattttttgaaactgtaatatttatttccctattgtcattagcctacttttccccaaggatctaagtttgaataaaaacacaggccttgaaaaatatctacattgataagggactgcattaacatttcagaaagtgtcatgtgaaaattaaatatcattgaaaaataatgaaattttactctttgaaaagtccagtaaaaatgggacagcacatgagaattttgccattatttctaagtgcaactatgttacaatactccaaaatgctttctgtgccacgcaatgtatgtgcagaaaaaaggcgagtgcagattttttaaaaaaacttaaactgatatcagtgttgtaagttcaaaaatagtattgagaaaaatatacctaaagtgtctttctattaaaatatacatgctttgtaaggaaaggtaaattattcaccaaaaaaaatcaagatgtcttcataaaatatatgtttactatatcttaacttgtcaggcaatttgaaattttgaataaactcatcacttaaatctttattttacctctttcaaaaatagtaaattaggtgttcctgtaggtattgattaatttattttgcaaaaaatatttgaagaataagggaagagtgatttcttattcttataagtcttaacaataaatatgttccttggcttgaaaattgagtgagcctaacagtacatagctttcttttcctatgttagtgagttacattatgtaaagcatattcatgaacttatatagattctgggtagttctgatgatatgaaactaaattttttaaataatttaactgaatattttgatattgcttgtatcaggaatttcttcactaaaagagcatatatgcaacagtgtgacctctttgggctcaatacaaaagtgatttgtacagtgattctgtgattttccaccataataaattgagaaaggcaggtcttggtaaaactttatagtcatgtatgaatacccatattcaggtcttcacctccaagagacattcattttaatttatgtcgttgtttatcatcaaggaagattttgaacttttgagaattggcctttatctgtcctaaacctctaacattccactgtatcttaatgaaacggaggttctgttctttctgcccagggcttctgataagtgtttgcagactatgtaaacttctgaataataactttcagtaaggcaggagtcttaaacctcttagtatcattttgtgcagtattattctgctctgtaagataatgtgttatcaatacttcataagataactttggccagagaatgaataaaatttatagtcactttcaaactgctccctttttttagggtgtgggtcatagatcatgcagctgtctgccaacagataatcttgatgagtaaaaagaagctaacagagaaaaaggtggcttagtctaaaacacttaggaaggacttaaaaaattatttcccaaagaattagggagtaaaaaaattgtaagtacatttgtttacagtaaaagagtggtctctttgtttgaggaattttccttgccacctcagaaagtgaaaatttactccttttttttttttttttttagaaaattaatgctggtgtgattgtttaacttgtgtaacctgttccttgaggtaaaatgaggaagaagcatatgatttggcctctcttttcagtgaaggaaggaagtccatggaaattactgaaccaaactagagatctaaagcaaaagcccttttgtgacacagatgaactcaatagtgcactgtgactatctgacttttgccacgtccaggcttaggccgccaagcggccagggtcagcaaattccactacctgaaaatgacagaaggcggcagggaaggggaattgaggcatggggagaagcagttgaagcatactagggaggcatgaggttctctctctctctctctctctctctctctctctctctctctctcgtgcagctaaaggaagagaaggaaggaaaagagggtgatcattgaacgactttaggggcaagtctggagttaggcgctgtggtgtccaagcagagccgtgtctggtggcggcaaactagattgctccaagcatggagcgccctgcttgaggacacttgttgttggactgtttgtttacatgcagtttgggtggcaaaaaaaggggaaagtctgggtgacatcagctgcaagaagacttaaccatatgccatgtcatccaacccccaattatttgaacattctgaaggttaagacatcaatccatccatttttctttctcttactctgaatcgtgacattattttctctagttcattgaccttgttggcaatttacaccaccaatataagcctcaggatccttttgtaaaatgagacttgacactaaattagtcaactaaaaatttaaagggtaaagggtccccccagccacccactcctgcccctccctgtactaaagtagaaaatttggacaaggcacaccatgcgtgtgactcaattgttctggccaaaaaatgggatgaataattttatttcatagatgcttggtgattactggactttacaaaagttaaccactagttaaaaaaaaaaaaaaaaaaaaaaaaaaatatatatatatatatatatatatatatatactgcttttgggtactgaggttgaacaattggtcggggataattccataaaatggatttaagtatttaacaaataatgtaaatgtatagagcaggcctaaaatttctccactgcctttgagtatacctttagaagtttacaaatacatgaggataaagcagtttcaataaaatgatcaattgtacaaagtatagaaatataccaagcgtctcttaagtaaatgattacaacatttagaagtattcatgagtttgacatatgcaaagcagcctatctctcatgagtctgagttccagcctccctgaacctttgtgcatttcataggctggtgaacagcccaaacatgtaaataaatagccattcaaagtgcaagcatttttaaaagtttaaaactccacacaagttcttttacaaaagagtccacccttttatgtacctttaaaaacatttagccactttattcttttgtgtctttgaagagaaaaaaaattaataaagttgtaggatccttttgaatttagaaaatgttggcaatgttggaaagaaagacattcagcatttcaaagttctggtggggaaggaaaaaaaagattctgaataaaacaattttatgtgattttgcaggtggtttgagctatcattttatatgtacgtttgtaccactgctcattggaatgttcatataatactgacctaattatgcatagaaaaagataagccatttacttgattcatttcttctttttaaatcaagaaaggaacaaaaaggctcctattttctgaaagaaattgttcgcttttattgcagaaaagtagcagcttgtgcagagctagaactgtaacaattttatattccaaaggttttgtgtgtattcggttagttacagtaattatacccaataactgacagccaaaatcacgtaggagaaagcaaaggctgttttctcacacaggccctgctgcagaacatctgctgagagatttgcatattaattaacccatattaactctaattattctgggaaattatcaaataaattgaattttctaattttaacctttcttttacttgacgcgtgtcgaggctgagaggacgcaccaggccgtctcacctgggcaatgagcaaaagatcttttctaccccttttgctcctttagacctggggcagcctggggagcttttgtgtgccttgtgcttttttggcttctgtgcctggtagggtctccatgcatttgttgagagagggaacatgtgtgcttgtgagcacagatggtggatttatacaggggtgaggaaaggtggtacctcagaacagttgagcaaaccttaagtttttttttttttttttttttcttcctcccagcctgttgtttaggcctgagcaaataaatgggagtttaattcaattagagcctggctgtagtcagtgcctcatgacagaaattattcaatatttttcccctcacattgtttggtttacacatcactgactcccttccttttgtactctgtttagagtggccataatgtgttgagcttttgtgtctgccatgtcactgtccctttcaccgttgtctggttttgtcaattgtgaggtgcaatgatgctgttttgaaaacagggtcctagtcagggtgttgctatgtgagtagggtggctgcagttttaaacatactacacagtaaataatgtcattagcccaatagacctgaatctactgctaagccttaagagaaatcctttgggtagggaagtgaactttacatgcctttctcaggtattagatgtagcttaaaactgagatttcaaagataaatctggtcagggcagtatgaagaattggactccattgcatgatcccctttcaggcatttctttggggtaagaggcaagattgactgagattagaattttttgcatgtgatcaagtttgtaacgacccatactttaagccacagcgatcaggagaaagctactgatgaaacctctaccacaagcagatctccagcccccctacttcgagccacatctcttctaaagacctatgactctatttccccctcaatgatttcacttctccccatccactaagatctattaagatgagccacacctcttgctaccttgaaggtaattgttttcctctggaagagctgttctttcccattatttcagctgatggagtagaagcattacggtacctccatgtaacattccttagactcaagaattattattgacttcagtaaactgcagaaaaccaagaaagtcaccaaataggtctgttggatggacaaatatttgaaagcaattatttttatggataggctagaactccagtctcctttttcatggaagcatggaatgccttttgcaagaaaaatatttctttaagagacaagctgttgctacttcagatgaaggtatgggttcatgctaaggtttttgaggggaggtggtttaatttcgtgggactacaatagctaaaagtgtatttcagttatatctgtatcttagaaaaatgtacagttacagacaaggtttagggtggggcaactaaaacaatcagagaaaatttttatagtttttctatttcgtgtttattttttacagcacattccaacgtactctggcagttactgactttacaccttttatgggctttgaaagttgtgtaaccttttcagaggaaggtgatagacacaatatctatttacacaaggacacatttcccctttctttatattccgtttattcaaggttttatttccaaggtcttattactataaaacttaaagctagacaaggtctgccctcatgtcagataaaaaaaaataccaaaacaattttgatggctcagaagcttattttttcatacttccaggtcctaaataaattacagttattttcacattcctcttgaatatccttcaggcatgatagtgagcatattttttctgtaaagccccttaatactttccttctgatggtttgtatagagcaagttgttgaatgatcgtggattccaataattagagagagtcttctaaaatctttttttccttttgacatattgttggaagacatatagtcacttgatgtatttatgaaagtctgtggaattattggcagtagatgtacaatatatatgaaattatttgtgtatagcagttgttttgggggtcttccctcagcatgccatcatgctaggcttgctgatgaaggtgctgttagactttttagccatcaaagggcattattgacttgtgttctggaatatagctaagtattatgtccttggattgtaagcatattatagatgttgacagaaagtgaagctgaaaaaatttctaaaggatagaaataactacaaaaactcactaaatgaaaggagcggtcaggggcctgtatgtttgaaacatcaatacaatgactagtttcctttggtaggagttaagtaaggtaatcaaaaccattatgagtcctagatatacaggaaaacccgaatatgtttacttttgtaaaaaaataaacagatgtcaagtctttgggaaatcataaatttcactgagaacactgtgacctagaaataccgtgtcttcttgaaagaaagtgaatttactgttacaaattcttcgaccaatatctgtttttaggatagcttgacaaagggagggtccttgcttttattcttatttgccattatgtttatatttttgatattaaggaagaggtttggaggggaaaattacatatctaagatgttattacctgcatgttggagcctatccagaacctcaacaaatgtatggaaatttgaacctttttgaaaatcaccagcatactgaaatttgaaaacctctcccaggtaccagggaacctgctaatatttccagagggaatgagtggctgccatcttcccaagatgctcctgtaaccaggaagttggaggagcctcagaactggcctctctccactgcaaccatggcattgcagaaattctgctctcattttatttaatatgcgtatttttttacatagctaatctgaaatggaaacatttttatccctatactgagaactgcttttgttttatcagctgacattttacaactcattaatttataatgcaggtttaatgccttcgaatgttcctgggataaaaaattaaagtggccaagctagtttgtataaaggctgactatagtatgttaacaataattatttataacaatattttgtattggatagcacattccatctgaatatttcaaattggcatggtcccttctaactggcattaattcattcatcttgcatccccaagtaataaagttattcccatttttaaatggagaaatcaagattcatgcatttcagtgacagatgttcaaattcagaagaaaatctctgtttgagtttgtctttgccttgtaatacgtatttgtcactaggcctccattattaaataagaaattgaaccttgcatttagtcctatgatctttacccacccaagcacggaggtaacaaggtaactgtgatttaaaaaaaaaaaaaaagtcaatgataaatccccccggatgggcaagagtcactggacaaaaattattgaaaaatagctgcatcctctcctcagtagcacatacttggaaattgaaattttgtggggaagacaaggaggaataaaggctaaggttcaggagaaaagtcttagaaggtcttcccgacacttgccacatgtaaagacgttgtaagaaagcaggcccacaaggcctttaatccactggctcaaacataaatgatctctaagcatgtaagcataagagatttaggaaaccaaatgattcataaaattccaaaacacttcttttttttttttttttttaaagacagggtctcattctgttgcccaggctggagtgcagtggtgtgatcatagctcactacagcctcgacctcccaaactcaaacaatcctcctacctcaacctcctgagtgactgggactattggcatgcaacaccatacctgactgattttttatttcttgtagagatggggtcttgcccaggctgatcacaaactcctgacctcaagaaattctccctgcttggcctcccaaagtgttgggattacaggtgtgagccaccatacctggccaaaaggacttattttaaatttgaagtcatattaccagcagagacatttttaaaatgaagttacatgtctgtgtcacgtctaagctgaaggattaggcatggtctctctcatcatggccttcctacttgaggaagcatttgcaaataaatttctaagtgaagggccaacacaaaaattgtgactggcacaagttcaaatcttcctttttcctcgtagccaccacacattgcagcaccagagaaaagacaacagacactgaaacaatggtatttcagtgattataccagttacatcaccttgcatttccatgttactgttttatacatcacacagtgccattgcacatacaactttgtaggctcctatgacaacctcataaacagggaaccattatcatgatttttactcatttctaccaagcttccttggatgataggccaaggccacacagctggttacacgttggttctgggacaaggcaagtcttcaagctcataattctgtgaactgcctctttatctctattgtttccaaactattgcaggaaacatgggtgtattgttagattctggtaattgatcaaattggtaggcttctataactcaaattaaggggatccatgaaagtaacaatcatcaaaacaatttaaaattaagcaacaatctccatttttgtggcatgaaaatcccaaaaagtcccagggatttccatcccttactctggtcatgtggggtttaaacttagattgcattctgcactgggaatttgtattatcatgtatgtttttgtttggctgttgtacacctaaagacatgctttctggtaccggctttgctaccaactagctgtacggcctttgacaagccatttgacctcactgtgcctgtattacctcctttgtcaaagagttgacttcaagtgtccttctggaactacaattttgtgattatatttctccaaataaattgtaagcttcctgaggtgagaatggcacttccttctatcttctggatttgccacattgtgggtatttaataaatgtttgatgatggcattgaacgatttattggcacgcttgagtagagttataggaaatcattattggctgccttattaacaattagctgtctataagctgcatatgtaattttcctttacatcaatagagtttctgcttctggtgaagacgaagtattgccccttcacatcagttcttctgtatgttaatacattagcaactgatatcttatttgtactgtaactgacagaataatgtagagaaagcatataagtaggaaaaggggttagtaaggtaacattgtatagggcatcttcaaaacaacagttctgctatttcaaatgtcaagctaattatcagcaatgtttaaatgctatgataggccatttttgcaaatgctgaaattttccagcaggtatggacgttataaaaatgtcaaattttgctactattctattacatgtcaccagaacacaaaaatctgaaaataaaagttatatgtataggcaaggaagagaaaccattatttgttttgcatatgactgtaaaattaattggcatagtgatataatttagagtattgtttacttggaaggaagagtagagaggatttaatataatgtaatctggtgaagtgaaaataatgcttattatagataaactataaagccttttaaatataggcttttagtaatgcatatgcagatatatctttccaggcccatttgctataaagcaaatttaagtatcagctttatgccctttggtaaccccatattatacatacagttttagagaaaatgaaactttaatatgattccacataaaatggtgagccatgccagtaattcttatgcccttcatatgcaaatagttttatcttatccatcaattatcatgtaaacatagtatcacatggcaaatttccctgtaatacagtacagtacctgtatataattataggtgcattttgccaatgcaactgttacacagaattgtaattaattcctctgaagactactgtgagagttttggatactgatgctgtttttggacatttattactgctctttagttggctttttgctatgcctcagagacagatgtaaaattagtgtctattttgagccagcaaacagtacatctttcctcttgtttattgaattgcagaaaggaattctttgggctcccacttctttgtggttttgaagtaactgtctgtttttgtgccagccatgtagctccaatacatgtctaaaattttgctgagactcatgcaaagggtggcttatttgacctgtaaggactgaatagaactttgctacgttatatgggaacttccaggcttttaaatgctgaataaaaagatatatatcataagttcaaaaacagacactggcctaatatattctgcccaatgaacctcatttaaaaccagtatacgttggttattatacaaaattgaatctcttctttgcagagacaaagctacattattaagatctcttctgccagtggtgatgatggtgggcaaacatcaaaacaggtccaaatgggaaaatgagcttatttttatttcataatgtaagtgcggctaaacccatcaagtattggccattctagagtaagaatattttatggtgaaaatttccacagtacttgtactaggcaaatccactgactagacgtgagggaacattttaaaggaaaatcctgggatttagaagtcggggcatggggtagggatcaggaagtgcaaagtccatctcagtgcatttaattttgattgtcagatggtcaaccagaaagagcagaatgagattgtctcatttgaattcagatataaaaactatgttatgaattgttgtacctggatttaaaaaggggttgggagagtggcacaccagcataatggcatatggaaatgcatatcctagttaacacagcgctagaaaagatggcatactgcctctgtaagtgaatttgacagcagttatttatttagtttaaaagtatttactactatttgtgagcacaaaccctaaaggttgtgaagtattgttgtcctgtgaaggtgatggatgctgtactcctgaccctatatggtgagacatgacttcattgcttgtttagattgttctgatatttgggactcctcaagggctgttcataaatcatttatctctcttttttttccacaagaaaatatttcaattgtattgctgcaggaacactcacgtgtcacacgggatattgtggtccatgcagaaaaagaccttaaaaggcatgggtttttttttttttttttccaggataaaggccttttaatgcctgtccagccttagataattttattcactccttctggacctttctttattcctcctgtgcccagagatcagtttttaggaggtgggttgaaagcttcccaggccttaggagcttttgttgtagcccccccattcccactcccccctacccccagcattctgaaaatttgtaaagaatcttctgcttgttgctaagaaatagttaaatctcagtcaccaggaaaaaaaaaaagaagcacattattgattgtactaaggtatatctggaccacacagctagagcagagatgttagaatatctctctttttgtagatctgagggcattacccagcctgaacttgcctaagcccttgtggtcacacctcttgaaaaggttttgtttcccccgtcaattggtattcaaaccaggtcagcagattctgtttgcccggctccgctgccgttttcattttaatttgcacctgttgtgcagttgttcggaaggcaagtgcagacccgcggattatacaaagatcatattatgagcagatatgcacggtgtaatctttttgtccccagcttcacatgacaaaaaaaaaaaatctctctctttttgttccttttttactccctgggaacctgtcaaagcaaacagatatgactgactaaaatttgtaactagacatgtttccagaattctccaaaagcattatgaacctgacacacaatccttttcatttttttcctccttttctgccacttttgtataatccgatagctggcaagagccacttgagatagctcagttgataacttagcggaggattgctttattaggcgcagagaaatcaaaatgaacctgaaaattgtttgcgctttttttttccacagccttttttccccctttctctctccctcttgttcccatgatgtcatggttctaacttgtttttttgtgtgtgtttctggagagttgggttaacagttcttggcaatcctgtgtgtgcgtaacggctggtgtgtttctctagctgagctaatgccccgtgtttattactctaatctttcttgtctggtggtaaagtggacaatttatgtactagcatgtaggccgagagcctgtgagggctgactaattcagaaacagccaccttcaattgagttcacagaccttatttacaggctgtctattttaagaaaagctactgagcattgctgggactgagggctgcaaaagcagcccgccggttcttgtgagttattttaacatttgtgttggtcttgcctgtgtcactttgaaatcttctgtaattatgacactatgaagacatctcaatagtagtattaatggcccagaagatatggcttttcctcattttctgcttaaaagattaggatataaatggccttagcacatgacggttgacatagaagaaagagtgaaaattcagatggagcaggtttgtgtatgtgtttgtgtatttgggtaaatagatggacgtgtgtgtgtgtgtctactgtttctagggaaaaaaccacagttaatatagtgaagtcatctcgtatttatagtacaacattatatagtaaatacttcatgtctctaagctaataaaattgtctattgtagatctattttataagtttttgtggagtatcgaaagtacatattgcaatacgtctctttacatatgcagtataggcatagtttgtgtgtctatgtttctgttgctttttagaatttcccatcatttttaggaaaaaattgtttaaaatcagaaagagcacccagctataattgaaaaagaataaaaatgctaaaacctgaaggatattaattatattttcctgacatggttgagtaattcagttatgaaaatattaattattttccatttaactaaacaattaggggtggctgatgtttctcaacagagtgtttagagagtgtgttttgtgcttcttctgcagtggtgaactatgacaatgtagtggacacaggttctgaaacagatgaggaagacaagcttcatattgctgaggatgacggtattgccaaccctctggaccaggagacgagtccagctagtgtgcccaaccatgagtcctccccacacgtgagccaagctctgttgccaagagaggaagaggaagatgaaataagggagggtggagtggaacacccctggcacaacaacgagattctacaagcctctgtagatggtccaggtaagtgtctaaaatcacttggcctcttcctgtaccatcttcacatcttcaactaatctgttccacctagcagatcgcccacaaccaaataattaaaatatttctttccattgagcccttgcagaatagagataccaaagctggtgacagattatgaagtgatagtaatgttatcacattgcggcagttacatcttaggaagggattatatttcagttttgatgcaagtcaaacatgaaccacactttcaacacataacatgaggtatttgcaccacatttacaatgtgcaaattatgtaacatgatcaagatctatactttcatgataggaaatggaagcaaatgtaaaaactcacaacatatatatgtatataaaaatattttgtgtggaaattatgtagcatttcaaaccaaataactgtcagtttaatgtagcttcagtgtctgtctgacacctcctattggaattcaatcgtttaatgattcccttttgttaagtgtgaatgtgatttcacacttttacctggtcaggtagctttcttattatttatcagctaagtacttgataatgattcctgctgtttggtgggactctcaagggaagtaaaaatggtcccaggccaactataataaaactaaggtaaattatattcaaactaaaacttccgacaacactgtgcaaacgggaaatgtcttggtctaaaattcacttatgacggagaatcgctaaggtatgaaatgtttaacaaaatacaagaaatcttattcctgtgaactttctctgctcatctttacatggtaaagtggcctggaaaatttgtttaaatgacctctctaattcagacctcatgtcaccttcatctctattcccaggacccactgagagttatcattgtttaccccaccttgttttttctttgacaacataagcaacaaaagcatttttataaataggtgaagtggctgggaaggagtctacctatatgctgttgtgatgtcgcagactataaaccatcaaacataggcagaataattgtttggtatactggaaggaggataataaaagcacttccactacgaaagaaaattaaatgtgagatgaaagaaaaagaaaaaagactgatggcaatttgagtacagtgtatttgtttttcgttttcctaacatactgtgccaagttttctactctttccgtttccaattttgctttcggtgaaggtttctcgaatctcagcaatcccacacataaacatttatcgttatatccattaagccttaaggttttagattttcaactatgagggagaactcagccaaagatgcttgaaagataaatacgtttaattaggggcagaggatgatcattaaaggaagtctgactgctgcagaagtcattaacaatcttaaatgaaatttttatttttatgatagccatttacatgtataataagagccaatgattcttgggagcagtgtgacagaaacagagtgtggcgagaactcatgtaagacatactatttaaatgagctggtgttagctattcatatttgttaatgaactagatatgcagggctataagaatgaatgttctgatgctttaaattttaatatctagaaatcaagggtaaggaccaattactagaatttccacccttagaagaataattaataacaatgtaacaaatgtacagccccaaacctcttttaaaaaagtttaatttaaaaaatttaatatcaatagttgaaaaacagccaaacagcaatgtcaagctgtagtagtttgtgattgtggcagctttttgtgttggtcatggatcataattctaaacgttttaatatacagtaatccatatgaatgcattgcagaccctgttatcacctgtagttaatggtgcctgtgatacaagtgaacaggctgttctttgctcttacctttatggtaaataaaccagcattctggagtcacaataattaaataaaatgtaaatccctaatctcatttggctatttggaccaagaaacttacccggctattacctgtctagttctaatgattactaatgatttattgttctttttttttattgttctaaaagtgctctgatgtggtgccttgatgtctaatgaaaagaaattggtcttaaaaagctactcattgtttatcctgactctgagataacacatttttcttctgataaaatatttttcttatttattgttcaaaacacacaatatagacaataactctaattctggtgcagttttatttagtagtgttttatccccggtgcctggctgtctacagtcatacctcagcacatagctttactctgagataagccctctctcctttgctctttctcccatgctttctggagtttgtctgcaggatgcaggttttgaactgaagagcgcagtggagttcttactgtgcctttccggttccagcacaatcaaagttttgtgtttggaattgtccttgacattctttcgtcccacaatggggtggacacagtgtgctggaaaccatgacatcattatcattgacacagacttaaataaatcacctgcatcttggcctctttctgcttattcaaggattcttcatcttaaggaagaaagtgctctttatttttacaaatcttcatcccaggggtgactggaagacgcaaacttttacaagtgttttaaaaataaatatactatgtggttttagacacagtatgctgagtcagaggtgtcttagagaatgtttaaggttagacataaggcagaaagacagccagattgcctttaattcggaggcaatattcctaaactgtgtatcattatgtccttctgaatatggattcacttgaaacttaattaaataggcatatacataacatttcaaatacatacctgaaaaggcttagtagtgtttcattttcacacattgagcttgatattcaaaaaagaaaaagattgatgctcagtgaatcaaagcaaagtactttctaggtaaaagtgacaccatctcatccaatgtctctgaaagatctcagttgcacagtctttggataaaaagggttataactaaataatactacaaaatgcaatttacacaatgtgctgactacacatttgtatacccagcatttattaatttgggaagcaaccaactactgtaacttctctttactttttcataagaaaatgacaatgaggaaggaagtgcagcagaaatcttgaacattaccactattatgcaaaaaaaaaaaaaatgctgttaactgttttcccctcagtgacttgatgtgctctcagatggaaaacttatgattcttgtgactcttggctacccgaaatcacatgagatgagcaaggaagaaagacacaaaagctatatttatatctagccctgaacttctcagaaataccttaatatgattccttgcagagactgataaaaatatcagatgagggagactttcaaatgatcaatgattacaattgacaatacaatattgctatatattaaacttctaaatgtttaatgtaaaatgtctctctgaaaatattttttaaataaaggaaaattccttgctcaggaatgaatttaagtggttgtacagcttaaacaaatatcattcaaattatctgattattatgaggagtgagattaaattagcatccaggtatatctgtgtattttaccttaagaggatcatgatttttcagttctgattccataaagagatttgctgcactgcttgtaaaatatattttattttatttttgctgtaacattttctagaacctgttctttcatgaaagtagattagaatatgataagcaaagaatgaccaggacagatttggaaattcgtagagtcctagttacaaagtttcccttgttttaagtaaaatgattatcacagagagatattcatcctggagcatatttggtctcattagtattgtcatagtaaaaataaaaatttttaaacttcacgtttaatttacttaagagatttttaactatcagctatcctgctctgtcctcctacgtcctctacaatctggtaggcagaaaatttgagagtgcccctatttttcaaattctcccttattttaaaatattgcagtttttgacaatgacctttaattgtttatgaatttttaacttcaacattatatatattcaccttcatcagaacactgagctgttgttatatatgtttccccagaaaatgattatgattacctacaggggcataaatcatgatgaggacaagacatttatggagtagttgggataggaataaggcaggtacgttttagaagtttgtatcaagcagtgaaacaggtattgttgttacttctgggatatttgttgtacaaactgggcattccaagttttgatatgtagaattaggttttcaaaaagtatgcttgcatagattagcaccattatagccaccccaaggggaaagaaaagcatgaaaacaaaatgtgaaattctgacttgccactaagcatccagagtttccagaggcatagcagccagcatgcctcttcatgagtgcaaatacttagttgcttttgactcttattgaaaaaataatatctttcccccatttgtcactagaactgccaccagaagaaaagcccttcatttgctccaaataagcacttctgtttttcacagcttgcagtaatgcttaaagtaaataagttcttgtgcagctagcactattggattcattcaattgcctgaacaaagctattgtttagaggtctacaacaagccttttctctgtttcctttaaaagaatcttccttgttcctgtgcttggcatgcttagtatagtaagcctttctacaattctcaaatgctaaagataattttcccccacagaagaaatgaaggaagactatgacactatggggccagaagccacgatccagaccgcaattaacaatggtacaggtgagttatgttggccacgctcagatcacatttgtcctgtgtcatgtgggtttagtgaggcagggaaggaaacagtgacacatccatttgtatctccatgacttaacaagtagtcaactttacaggtctctggttttgtttcaaatcaaaatttcctacattttggtattttactaagcaaatacatctttcattctcacacccctaatttacctgtgacgctcaagaatactgaactctatgaatggatcctttcagtgcatgagttgggtgaatttctagtagtaacttttattttaaaagactgcaaaaaattattttaaaattaggatatgatatacctctgctagccaccacttgatatcagtcgttgagaattcaaatgataaggtgtaatttagactgtaaaatttttttttcagaaagacaaatttccacgaacatttctctcaataattaatcatctcagttccttttaatcctttctttacttgtaattctctgcatccttgagcccttttaaataattttttccaggcagttttagagaagaattgacaagtttacttatttttaatgaagctaaaaaattacagtgggaagatactgagtggtgttttgttttactctgctactgcaatagaatggagtttcaggacaactgtgatattccatgttttttcccaaacactgaatggcatcttctctcacattcttacatcaccaacacaaatttacatgttccatctctcttttcctagatgagactatttattttgtggaggggaggggtgttgcaaacagtcctctacactaccatcacaaatattagcatagtgtccaccataaaattatcttccaaaataaaacaaaaaaaaaatgtaactacttctactcaactcatccatgaaaaataacttgaagttttatgaaatgtaaaaaactaagatgattttacatcacccttatgttgatacacatcatgatagactgctcatgttgtgtttctgtttaaaatgtgcttattaataacttaaaagcatgaattcactttcctgggtataaaataagagaaataataaaaacctattgtcattctattcattcgaataatgtcaatttaaggtataaaaataaagctgtacaatagatgattctagaaaaagtatagaatcaagcaccaagaatcctaatttttacacacagccctgacaatgactagattgtaacccttgggcaagtcagttttcctctttggaactcagttcccacaactgcaaaacgaatagattcaactagtttcttgataataatacttctagttttaatattttatgttgcatgggtattatcaccatgtaaaaatagaaacaagataaaataacttcatattaaaacaaaaataaagcgatatcatgaattagatactttctataatgtcccaactcatgggatcaaaaatggcttcaagttccttttaaagataaatgttaaatttcagcctccagcataaataaaagctgattttgattacccttataagcacttaaagtgtcacaaaagaaaatttaccccacaaagtaacaatttactagctgttgtatacacctagagtttaaagtgaggttaataaaaattgcttctattcagaaggtttaaaaatcaatcttgaatgtcttttcaccaggctttaaacaccccttttttctcataatacctgctgtaccttgtagttcatatgtattcagtcaataaataaatcaataagtgttcattgagtgtgttctatatagtcactgctgtgtgcatatgtggtagaagatgggtcaggaagactaaaacatggttatcatttcatttggaagatgagactaatacacctgaaaaaataatgatgaagaataagtgaaaatatgtgataaacctgcaacaaatggtaggagccataattatttagttttttgttgttttgttttgatttgttttgttttgtttgagacaagagtgtcactttgtcacccaggctggagtgcagtggtgcaatctcggctcactgcaacctctccctcccaggttcaagcgattctcctgcctcagcctccctagtagctgggatttcaggcatgcaccaccatgcccggctaatttttgtatttctagtagagacggggtttcaccatgttggccaggctggtctcgaactcatgacctcaggtgatcctcccacctcggcctcccgaagtgccgggattacaggcatgtgccactgcgcctggcctataattatttgaattacagaagtgagagagagtctatggaatgggcattcacatcaggttttgtgaaggaggtagaattcgaactaaatacattttcaatagtcatggaggagtgaggaagggctttctaattgaagaggagtctgtgagccaagaagggaaagtgtgacatctattcagaggatagtgagtaaagggttttggctgaatcagagagtcctaggaggcaatttctgggaaataaagctggacatttaagttaaagccagatggtggagaatataaagcaccagacagaagagtctgggtcatgttatgctaccatgatttctgtgggtgaaaaccagactctgagagaccaactggaagtcactgtagttatccaggtgtgaagtgataaaaatcttgtcctaaggtggagacagtgatgaaattagcaacatgacttcttaacaaacaattgattctctgaatgatggaggcaaaatggcttcaaaattacagatctgcatgtttagcatatagcagtacttgctatttctagatttacagaagaaggatctaattttgagaagatcttgaaccagcctttagacacaagtattttcatataaaagatatatagatatgggaatataggaatgtcctttggaaatgaggaattgaaacccaagaagtcagggctggagatagagatttgagagttatgcaaatatactcagatcatgttcaagatcacacaggactatgagatttacaactgagtgtatttgttgaagcaagtagaaagctgaggccagggctcctggtgggtggggaggaaaatcaacaaagattttcttttgaaaaaaaaaaaaaaagattatgacacaagagaaaaaaattaaacattcagaagcaaagaaagagaatttcgtaaaggtgagaactcagttaaaagcttcaaataactacccttgaaagaaagctgagcaaatacactggacttagttaattagaaatttactagtgatcttcagcttacaactctgccctttgagagaataagtacatattctttcttcctagctacaagtttaccacttcttctccctgacatctctttggatgctaaatacatgtggttttagaaataatacatcttttctggttgaaattgcatctaaaagactatcttcctctgctcccaagtcttgctcatcaagctcctgctattggctgaatttcttctctagccattccacactagaatgtctccctccaatgagcctgtggggtttgggctgctttatcgccatggatcctggaatggtctccatcacaaagtgtgtctgaagaaatgagcgagtgaatgggagacaaacagcacttggacttcccttttgtattttcaggttaacatatttttgagccctggcctgaagtaaccaaccagacattttcatctctccattattccagtcatccaaacttgaaagccttagttatatttgactgttctctgtccctcatgtcctcctctatttagtcagcccacatctttcctataacagtttcctcaatgtccaaattcccttcttagaatcctgaattgccccttagcacctacaggacgttcttcagtccgataataagtgccatccattgtataccaatggcgctccattcttgtcagaccaaatcccttggtgacaacaaaaaagaaccacatttataccaacctctgaatctctgcccatgctatcccttcagaccctaatcccccagctcctttcttccagtcatccaaattctccccatccttctgttcttcaagtccaggtcacatcccatttccttaatgtggtcatctctgaacaccccaaacgacagcaatctcttcagaacccttgtggggttctgaaatcccacaaccctaaggtgtatgtggctaacttcagcatgtttcatcgttcctccttatattgtttgcccttatttcatgtagtcaatttcatgaagacaagaggtttcttcagctgaaaaatgagggtggatcatcctggtatctacctcattggctgaccttgttctctagccagtaattaaataaataattactgaggtaattaaataaataatgaagccagttgtggtggtctggcccataatctcagctactcaggaggtcgaggctggaggatggcttcagtccaggagttggaggctacagtgagccataatccactgcactccagcctgggtgacagagcaagaccctatctcaaaaatagtaataatcagaatgtatatgtcgatattagtaagtgactaaaaaaatgtttgccctaaggaaaggactattccatttgcctcaacaagcccagttatagcagggagcacacatggcagatattacaactggtgaaatgaatgaatgaatcaatgaatgaatatttggtggagaagaaatggattctgataaaggaagccacagtaggggaaaacattctctgtggaggagactaagtatcttcagagagtgaaactaggatctaagtccctgaaggattttgccttgttaaaggcaaagaagaatagcctagagtatcactacattttttttttaacaacaaagttagattaactgaatggcaaaattgatctataacacataaaacagtgcaaacctggatttatattaataactttccacattgcataagttcaccagtttttatttttttttaaaaaaggaacaaaattgtaatgctttcacacgtaagataaagaatatcttctaacaaagagccttacaactttcagatattaataggatttaaattcaaaatgaaattattaggtaaaatttttaagtgtgtgaatgaaccattttctaagaagagtagagaaatggaaaaacttggaagcattatacacatgagtttgcctacgtgctagtagtaacaaggagctatcttaggtgcatggtgatcattagcattaatgcagttccacgtgcatatcaatatccaaatagggccctgatgttttactctttgaatgtgtgaaagttatatttactcagacaatctagtacctctagttataaagggctattaataaccacctgcatctgcgcttcctttgctaagagggggaagaggtaccttacatccagaaactgggcaaggccaatttaggcatcagttcttaatcttacacaacacaataaatttcttgtctaagaactaactttatagactctaactatagtcaaacttgtttccagtattctaagaataatacataaattatttcacatatgagaggcaattgttttgggaggctccagattctagagaccaattacctacacttgaattttatctctaccaattactagttacattaacttgagtgtgtaattgataagccttcatttctacatcggtaaagtggaaatcatgattccttatgtacaaggcctcgctgtagggattaaatggcatgacatttttatttatttattttttaactttatttttattttctttctttttttatttcaataggttttggggaacaggtgatgtttggttacatgaataagctctttagtagtgatttctgaggttttggcgcacccatcacccaagcagtgtacaccgtgcccaatgtgtagttttttttccctcatcaccctcccaccatttccccaaagtccattgtgtcattctcatggcatgccatttttaaagcacccagtacaacaactaacatagactagatgctcaccctgttttgttttgccagtttttttttttttttgtttgtttgtttttttttgagatggagtctcgctctttttgcccgggctggagtgcaatggtgcaatttcggctcactgcaacctccgcctcctgggttcaagcaattctcctgcctcagcctcctgagtagctgggattacaggcatgcgccaccacgcccggctaatttttgtacttttagtagagatggggttttgtcatgttggccaggctgatcttgaactcctgacctcaggtgtccccccgcctcagcctcccaaagtgctgggattacaggcatgagccaccaggcctggccaacttcaaactatttttgttcattaagaaatgaatacatcgtaaacggttttctccattcatactggttcctccttaactttttctctaggaaacaaaaatacaattttaacaaatttgtaatgaaagaactaaccaattttgagaggctttgacatttaagttcttttgacattctggaaaactacacagacaagttgtaggacacattattttcagtactctggcatttgaggctaaaatatgaaggttaagaactagtttcgttttatatctgatttcatttttatgtagcatcccttctttaactgtgtaggaggaggatttagtagtatttataatgattacgtataataatgatgaaagctgtcagacttttcctttctttgacaactgactcacatcaggaatcgtattctttttaaaaatttattattgacacataacaattttacatattaatattcgtgaggtgcaacatgatgttttgatacatgtataaattaatgatcaaatcaaggtgattagcatatccatctccttaaacatttatcatttctttgtgataaggacattcgagaacccccgttctagctattctgaaatatgcactacatttttgtgagctccagtcacataatagaccaacataactatttctcctatctaactgtagttttgtacccattgagaaatctctcattgttcacccttccccctactctcctcatcttctggaatcagcctaaatgtccatcaacagatgaatggataatgaatggtatatatacccaatggaatactatttagccataaaaaataatgaaatcatgtcatttgcagcaacatggataaacctggaggacattatgctgagtgaaataagccaagcacagaaacataaatatcacttgacctcactcatatgtggaatctaaaaagctgttctcatggaagtggagaaaaatcatatatatttttttcttcttaccctggataacaaccaataaacaaaaacgaagcatttgcccattgttaacaaccactaaaatacatacattcagagtgtttgttgtatgtagaatttgaactgaggcttgaggaaactttaaggaaatagaagggtgagttccttccactaagcaacataaaattttaggggtgttgataaaaaaaaatcataatgacaagaagagaaaatttacaaataaataattatagcctcattagttattcaactcaatggtcacttattgggaccctactaagtgcaaggcattttgttagtcatcacaaaagatacagtgagaaaagaagagtcactgtcattaaggacctacattcatccgggtgaataaaacagtggtagacgaatacgaaatgcatgtaaaatatttagtgcaacgttagcgcataataaatgcgctatcatttctagccattattattgattataatatcatctggattaagacgttttatttgaaatacagcaagctatgtaagttcaaatgcaaagtgttcagtattgtagagggtttctgacagtatagggtcaaatattggagataggacaagagaggtgccttaaagaaattgcaaatttcagggaagactttcttcaagacaaagacttgctgggtatgcctctgtgcacaagagagaaagagagaaaggctgaaatgtaaaaggagactgggtgaaagatggagtgggttatcaaacgagttgtaagagaataattttagatgatagccacaataatgtttattttttagcagtaagatcagaagaagaagacagaatgatgataggagagaatgtagtcaatttaagatgatccaaggaatacacactgtatgggttgcactctttgaagtcaataggaaaaagagactatcagtcagcagtaagggaataggaatacagttggaatcttgagacatggacatgtagaataattgctgtggacaatgcgtggagattcaattattaggaaggaatatcccattttgaaaacatagtctgcaacaagactatactattatttaagatttttttaagatacgtttgatactccagaaattggactggatcgtagttcagcagggtaagaatgatacaagtgtaagggacagagatggaagtgatgatttcaagttccaaggtgaactgaggtaaataaaatcagaatgggtaaaagggactaggaaacttttcagggcctgattgtcacattgaagtacacgtttcaagggaatgagaaactggatgataggcaaggggagaaagtagaaatcagagagcgaaagttcgcggttctggttcttgtcccagggttagcccaggagcaagtgtggccatccatgttgctggattagagaaagcctaagcactgtgaagccaggttctgcatggactatctattaagtgatgaagtttcccagaatgcaatggcatcctgtgggaaatgtaatcatgggacaggcgtcattttgcttgcagtatacaggcaatgtcctaaaacatgacggtgaaaatggatgactttcgacttcgacttcaaaccattacagctacagagtggaaacaatttgagggtagaggttaggtctgctcttctccataatccctctcagaggatgcagtggtttatacagtgttaatggttcataaccagggtatttgttgaattaatgaataaataaacaaagaaataaatgatgagtgagttgacgaaacaggaacattgattggaagcagtagcgtgaattaaggagtttgttgacccttcctctttgttctgtgagtcataacaaatgaaagcaggaatggccctgtggaaaaggtctgtaagggatgggttattatcaggggatgacacagtttcatttagtctgaagaagtggaacacatgtaggaggatataattaagcatgggaggaaaataacgagtaatatgtgaaatgggaaagcaaaatgaaccgggaataaagttcttttttggtttctagtccaaagttaagcttgaggcatttcttgtttactataaccacaaaatatctaatatctgctaactaataactaatacctgctattttaacagatgttaaaataatacctaataaaaattcacctttgcaaggtgctatggaaagttattctttattgagcgcctttagaaacttgattacaaattagaaacagtcaaattaggaaatacaatccttaaatattaaatggaaattttaaataagcatcttgaacagagaatttgaaaaacttttatgtgttctctttgccccactagacccagctctggattacccagttaaaaaaaaaaatgtaagaataaaacaagtgtctaggattcagaggaatggggacatttaaaaaaaaaaaagaaaaaaagtaaaaattttctacacacacatatacaaacacacacacacacacacatacactctgaagtgggcattttaactgacttccccccatattcattgtatggtgtaataatgttgctatttagaattgcttataatgtcattgtgatcgtttcagtatgtagggcctgttcaaatggtaccaagtcaggcatgatgaaaaactaaaaagatgaggttctctcttttcttgcctctttctctcatgttgagtcattatggtgcagtagaaagagcagtgggtgaagagtcaggatacataaatcctacatacagctcttccagaaattacttgtgcaactttgtatgaatcactaacctcactgtaccttagttgtaacatctgttaaatgaggaaatcaggctagaaattttgaactccaccccaccctgccctttcttctaatgaaattttactggaagcatgaacaaaaaaattactggaccgcactagccgtcatgggatgggaggctctcgggggccctgcctcacgataacatacacagggccagcttcctgggtctgggacctgcacagtcgcacagggcccagcactgagaagggctgcttggttggctctgcagttgctgtcttgaagctcttgacaatttttgaatgaggggcccaacattttcattttacactgggccccaccaaccatatagccagtcctgttcatgtctcacaaaatacatgagaagaatagcagagtacaagctaggatgggaagtggtggaatcagagaggcactgcttcaagtattgaacagaaatgccagttaggtctaagtttacaggatccttctttgggtgtctccagagcaattgaaccccaagtaaagatccagatctagactgaaaatcttgcctcagcaagaaatacagtggtgccaggtgtaactcccctaaactgataatattagtataaggttggcagcctagccagcaattaagtctctttaaccatcaattctgtgcatcgcatcgttagcataggggaaagtgggggaaagaagaactttttttactttcactatcctcttggtttaataactctcaatttctcctgttcctcttaacatggagcttaaattaaaacttttaaattagttagctttcttatatcagtaacagaagcgatacaagtttgattataacgtatttctctgcaagagttgagtggatatataatgttaatcaattgtacaaaatcagtttatcagataattcagttagtacctaaatacttaacaaggagggaatcatactattacaaagtatgtcatattcttcttggttgtatctatcacatttttataggttggaagagttttgtctgccagtcagacatctgtcagggaagtcattattttttaatttcttagttaacttcatacattgagtttttaaaaataaggtggagaaagagataggtttggaggagagaaaaatagaagtagtgcttggcaggtgagacgggggatgattttcagactataatcagtgaacgccaagaagagcctgttcacttcctggctaatgaatgctgttgttttattagctttgtttgcgattaggagcagctatcttcacttcacagcaagtgttcccacaagaaataactgatatttcaagcttcttgagtgcctccttcattcattcaacaaatatttaataagcgctgttttgcttgtgatgttgtctggggtttccaggcacttccaaaatattttctcttaatctgcatgtttgttttccccatcagaaagctgtgttgttttgagtttttaattgaaaagaatacagataaaattctctaggcctagccagtaaagaaaaagcaaactgattaaagtaattaattaattgaaattatggaattctggaactttgaggacaccccagaaagcacaccctggctcattttacagatgaggaaattgaaattcaaaaacatgaaataactgagccaaaatgaggagtccaaggaccctgaaccttgcctaatcattcaattattgcataataactgtgacccaggcactatgctaggtgctggtgacacaaagctgaataacatatggttcattcttttatcagctcacagacacgtaagagaaagattacgatgggatgtgatcaattcaatgattgagacacacagatgacattcagtaagtgaagaaggaagtctatgtgaactcaggctgagatagtcaggaaagctacctaataataataatatgggaccaattgtgcttctctccaaaatcatgttatgaatgtctcatttagccatgcgaggcagaggattgaatttgtagagttcttaaattggacaagggtcagaatttcgtgaaagacttgttaaaacacagattgctggttccataggtttggatgggccccaataatttgcatttcaagcaagctcccagatgatacggatgccactgacttttgaaaatcactgactgtcctgagcattcttaggtttcacgtgtctctacataaagcataagaaaagagcattgaattgctgggcaaaatcaccttacttcatcaactcctctaaattataataaactagtctatctttttggtaatatgccaattccaaatttttaggttacacagtaatgtgaaagacaagtgcatattgtctatattgggaatttttctttgtgtgtgtgagatggagtttcactcttgttgcccaggctggagtgcagtggcacgatctcggctcaccgcaacctccgcctcccaggttcaagtgattctcctgcctcagcctccctagtagctgggattataggcatgtgccaccacacccggctaattttgtatttttagtagagatggtgtttctccatgttggtcaggctggtcttgaactcctgacctcaggtgatccgcccacctcggcctcccaaagtgctgggattacaggcgtaagccaccgtgcccggcctatcttgggaatttttaaaaaagtaatggactctatcattctgtgccaatacacagcaatcaaaatcgttgagtgttagcagtctctacatcttgatattcaaaatcccctaatgtaagatctcctgctgtttagggagatatttgatactgcagactactacagattcccattccttgtccactcttcacctcgctctcctgaagctctcttacatgagaaactctcattggcatctgaacatgtgttccctggagaaagccatgttcagagcaggggtggagagagcggccaagatgctgtactaattcccaggaagagcagaaaacttttctgttgctcttgacgacctggctttatccatgcctctgtaccagctggaggctctgcgaggccgcccatgtagctgtgtaatgagaaaaagatcatcctcttccctcacggttgtttttaggtaactagtgccaatatgtcttttggaaaccttctgcaaaaacgcatacatgcacttttaatgatgaaaagcttacatttattaattagtcaactttaaacaaagtagccatgagaatctatagacctcaacaaatgctgaatatgtgcttccttaaactaaaaaactcaatacaaatgactacattcaaaataattttcgtgttttcttatcatctgagatgttaacaaaaaggctgtttttcaaaaagatgataaatacagttacctagatttgtaattgcttcttcaggtccctttgcctttcatagtgaagtaagcaaaagccagattatatgataaatacataatttatgttatatacattacattacactggggaagcgtgtgtgtgtgtgtgtgtgtgtgtgtatatatgagatgccctattatacatatatatatatatatatatatatatatatatatatatatatagacatgtctgtatattgcagaatcacaaccattatgtgtatatatctccaaacgggtgaatcacagaagtaggaaaaaaatttaccactcatgtcctcatttccaagaacactggcactagtaggcactcaataaacagttattaaacaaggggatggatggatgattctactcagttttttacatatacttgctgcaactcctctgtaccttccaagatattttctttttaaaaagaattatttattcattttgatgtttacttaaatggcttaacataatattcaattttcttccattttttatgaaaattaaaagcatgcaggacactaaaccagtgataatagagtacctgtcttccactgtgaacacaggcttgctacaaataaagaaaatgaatgccaaagggaaacagaaaatgataaagaataagtatctggtctatatttcattacctgtaaacactaagcaaagcccacttttaagtatctttgagaaagtattctaaagcaacttgattatgggggctgactaatttggggaccaatatttctcttttatttagagttctgttaacatcgcttgaattttaggcaataatttttaaggccagtctatgttgatatttattattatctgtctgaaaaatcaattatctatctaacgcagccataaagatatctataaaagtgtcattaataagcaacattagtaagagtggccaacatattgccaagagaactgaggctttcctgacaaaaagggacctgaaaattcaccctaacaatctaacagtattaaaatacacatggtcatgaggaaacatttttaattaacattcttttttatggctgggcgcggtggctcacgcctgtaatcccagcactttgggaggccgaggtgggtggatcacgaggtcaggagatcgagaccatcctggctaacggtgaaaccctgtctctactaaaaatacgaaaaattagccgggcgtggtggcaggcacctgtagtcccagctacacaggaggccgaggcaggagaatagtgtgaacctgggagacggagctggcagtgagccgagattgcactactgcactttagcctgggcgacagagcaagactctgtctcaaaaaaaaaaaaaaaacaacaacttttttttggtttttttgagacaggggtctcactttgtcactcaggctggaatgcagtggtgcgatcacagctctctgcagcctcaacctcccaagctcaagcgtttctgctacctctgcctccccagtagcagggaccacaggcacgcaccaccatgccaggctaattcttttactttctatagagacgagatttgttgcccaagctagatattctttttttggatagagaaaaggttatctaaccttagagaagattgagagatatttgcaagacattagggtaaattttaggactaaatgcaaaatctctggagaaggtatgggaagaaattacttgagccttcttgtgaatttttgttatggtttgatcataaataccatgcaaatatcctttgtcagtgtgttttggcagttcttccaaagagaccagggagtgaagaggattacagaaagaaggaaaatgaggttgattttacactagaaaaatgcagtgaagaattctacaacctttcagctacttttgtacctcattcctgtgtccagtacacattattgcataatctttctaaaaacaaacatacaaactttcagatacaatcaaaacttcattcttcccaacaattctgagagtaaccaaaattgaatcccatcatttgtcctagtattgtaactgttagggtgattttagttttaagagactgaaacacaacataccttcaagcagaaaaggaagtttcttggctcacggaatttaaggaaggtggtcaaccgaaccactgcaaggtgcacctcggcctcaggaacgagaagagctagaaatgaactgtcagaacatgcaatcttgtctgcttttctctgtatgtctgctttattctctcttcataaatcttctttttctagatggaaaataacaattccttcattccacattttatagctacagtcacttggcagaaaaaaaaaactgccttgatgctttttctggaacaaagtcctaaaatcatagggaagggatttattgaatttaattggatctattggctaccctggaccaatcaacaagttggcctggagaagagaggactgagattggctcacctgagcaacagagatcaattgtggctaggggagcaggatcacatggtaacacagcagctccttgggtaccataagccttggcaatcaggaaatggagaagcattcctaggacaaggtgaatgttgaagtactgggcagaaaaactgtatattactagcacctattgcacctcatggaaaaactacattagattcatgctggtgatacctagtttctgggaggtttaactctagcccacttaagtgaccctaggtatgtgagatatataaacaacagaatatctatacagcatgaagaaatatccagatggagcaaatggatttaaatgattgagtgacatcttcatgaaaccctttttgaatacttatctgagccctatcaaactctttcaagtatttatgaccactactacacagtttatcaaataattattctacagttgcctgagtattaggtctaagttcctagctcagctgcaggtatcttattttatgcttccttttaccaaaagacctctacaccaagattagtgttaaggacataatttattccacattcatcccataaatgattcttgagagcctactaatttctaggcaatatattcaatgcccaggatacaaagatgatcaaagatgaatccttaaagagagcgcatgatttgatgtattttgtccccatcacacttgacatagaaatctagcatagccaaatttgatctagcaattgaattacctctccaaacaacagtagtgtatctagatgcagttttgtttgcctatccagaaaaatcagaattttcctcccttttaagccaaaaggctattaatgcaaatccaattgaatttgcatatgattacatttctgatggaaacattcatatgcaaatgaaaattcatgcaaagatagccagatcattcaaatagttgctgaaatatcaagataaaattaggatattaaatgtacatccatctatgtttactaggttacactaaggtcatcaagtaggacaatattctcaaaaaacttaaaccatgtcttaacccttaacataaaccattgacaaccctcaagtagatacgaattcagaaaggagctattacgttactttgtgctgtcatagtactgaaaaagaagtcagtcactgataaaatcagtgaagttactcaaaagacattcatcatggctctgccattttgccccttttatcctttcttcccatcaaaagtaaaaggtgattttttgatagatctgatgttattttgatgatccaaaacaatgagcaaatactttatgcaagttgacagtttctacatactccataggggctcagtgatgcaagtgaaatgacatcatcacagtcaccaccaataagtatccattggaaagcatccatgacattgtgcatacagcaaggggaaagtgatcttatctaaagcccatattctttattaagtccagctaataacagatttaagcaaaatttcaaggtataaaatcttaatccactactgtacattccaaatctatttttgagggaaatacggtcttggaatagaccgttgttcttgttaaccttattagaagttacagaggcaaaaaagaaaggtttgagatcacagcattcaggattactggcgcttagtttagtggtccacatagtgtaattctcccacttccttttatttggtcccatatatttgtttatagtttcaagtctttttagaattctagtgttctttgctttgatgaatgtcacctaccatccatcaaatttggaaagtataaacctgagggaggtaccttagcatctcccaacttgacaaactgaattctttcccagatgaatctgaggaattttggatcttaggtatttctcaaatccagacacttccttcatctccatcatcaattccttaacagtatcttttgcctggcctaggacaggaacctcctaaccggattcccaggacctacttttctctttctccaatccctatcatactatagccaaggatgtcatctaaaaatgcaaataatcatagtttcatccagccatcctccttgcttaatactcttcaatagcttcctgcttcttttagagtaaaaacccaaatccttaaacaagctcttacctgctgcatggcctggctcccgccttactctccacccttacatcacgtggttcccctttcatcctctgcactccagcactgtcctttttttttaacatcctgagatgtcccatgcttgtttcagtcaccacattgcacatgctgctcttctccagcttctacatttagttaacttcatgcttcttcagttaagaccttcctgatcttctagctgccatcaggttcctgtgttactttttttataccaccatataactttctttcataatacttatctgagtttgtaatgatgtgtttactttggagataatatcagttgtattaatctctctcatggcttcccgaaggatgagcctagaactgttttctgctcaccagagcaggacatgatgcctatcacacactaggcattcagaaaatacttgttgaattaatggatagttccactttctattcccctcataaaaaatccaagttcataatcatgaaagcaaaaaaaaaaaattgcctagcttgcttgcgcatcaccctgccacagttgccaaagagaattagtatgtcaaatactataatattgtttatggtagagaagacaaggtgaagaatctcgtggcaccaaggttaactgctttcaaaaactatgataataggattccaccattaattgtaccagcaaagcacttttttcacctacttaggataaagaataatataacagctactctcccaactttgttagcataaaaatattatttatgatagctaagccacatcttatttcagaaacacatctagaggtttcaaatatacaaaatcttatgacacaagttgctaaaattgagttacaactgttattcatttcacaggaatagagtcataattacaaaagttaaagtcacatcaaaatcacacaccagtttcttaactccctctgttactttttattttatttctatcagctgtgagcttaattttattttcagcagctttaaaatacggaactaaagattaaaattatagggaaagataaaatgccacattctggtgcttttttttttttaacaaagttgcattattatctgtctaggaatatctttccttttgcatctgtctcagactatgtagtcctggctgtctgtgacattcagagggtggagggttaaaaacttatatttagcaacaggatgtatctgtggttagggacgctcagtctagtggacaatgaaaaattaaatatacctttcttagaagaaaatgaaatttcagatagactattaaaataggcttaatcttatattatctttaatgtttatggatcttagaatgcagttgttggctttttaaaaaaaatttatgaaaaacattttaaatttctttcattctttgtatatacagactaatattccaggaagaaaaaataaaataaaatgtgcttatttaacttgaaggaaagtgcccgccttcttgcatatattgcaagaataagcattcagtcaataatcggtcatcttcaacacttcttacaaataaactaggttttgtagtctattgcaagtcagcatttctcactggctatgatggagatggacttgggatcctaggaagaaggcccggaaacaacatttcttctccttttatgatttcagtgaagaatgcaaattgcacatcagattttgaggaatactttgccaaaagaaaactggaggaacgcgatggtcatgcagtcagcatcgaggagtaccttcagcgcagtgacacagccattatttacccagaagcccctgaggagctgtctcgccttggcacgccagaggccaatgggcaagaagaaaatggtgaggctgtaaatcatttttagccactgcactgacctctgcagctgttacaattacaaatgcactacatgcctgggtgtttaccttaaaatttgaagaacagctgcagaggcatggaatttcatgagcaaagattagaactgtaattttagggtattgtgaaatttttttgtcagcaaatttgtgtcatttgtacatccaataaagaacaagaacaattagagcccatttctaagagataaaaatatctaaatgtattcctatctttctgaaatattttacttttgaggaaaaaaaagttgagaccgacactccctcaccttttgttcttctccaccgacacctgaaacgccccttcacactgtgagttcctgagtaatctgtggctacaggtttcataggaactgtcagtcacctaaagagaatttcctcatttatcagctgtttaagtcccccccacccccccaaaaaaaaaaaacctgaagtaattaattaatttttgagcacagtgtgagctgattccgacaagtctgtcctgggcatgcgaggggactggtgtgcgagggggccgggtgcaatgatggcactctgtggagcagattgcagtgattcctgtcataccatcccgggcagtcagcccattagctgccattgatttactgaccttttggcccgcttctctctctctctgtctctcggctacagacctgccacctggaactccagatgcttttgcccaactgctgacctgcccctactgcgaccggggctacaagcgcttgacatcactgaaggagcacatcaagtaccgccacgagaagaatgaagagaacttttcctgccctctctgtagctacacgtttgcctaccgcacccagctcgagcggcatatggtgacacacaagccagggacagatcaggtggggggatggttttaagtgatttctttctataataaccccttagagaaacgatattgctttgattggcaatcattattaatttttcatggcattttgaagatgcagatcttttaatggtaatagctttaattgaggtctaaatgattttttgatggtctcttctaatatgatttaatagtcttatgttcacgatcgaatgagtgtgttaatttctaatttagaaattttatttgcactttaacttgactttagtttcatttttatgttccacaaaaagtgaatgaaattgtagcattttaattatacattattaaacatctcagcaattttaattccatttttcacctcgctttacttagaaattttcttttcatataggatctaagtcatagaaaaagaagtgtgtatttctttcatttttcatataacaccttcaattacttagagtatttttataagctgctactagtttatgaaatctgattaagtgttttaaggaaaatcaaaaaggcatatattatctgtgtatatataatatataaaataaattggattagtactaaaacgttggatgtacattaaaaatgatcccttaatatacatatttgtagctaaatgttaaaattactccccctctttttgcttacttgtctcaaaaataaaaactctgtcttcaacagttaagtatagcttcttaaatctttaaaacaactgaataggattgattcacagtgttccttaaatgttacatcaaaactcctctttcccactgggaggattgactctgcaaattgatattatgatatgtttgcatggacagaagtggtgtgccttaagtcacaataactggccctacagatccggaatcacttaatttaagtcttgacaccatgtctgtttttaaaattattgaacatgatattgtattcaaaattcttaggttttccttataaccttcattttcttcgaataaggaaaatgaggataagcaaacacagtcaataatggtgataagactagattatggaattttactattttaggagaacagctcatgtaaattattccatttatatctgattgggcttgtcacctgaatgcttttcaaagatgagttataaaaaatatgcttgcatagttgcacttatgtaacagtttatctccccttgcttatatgcacaaaaactcaaggaaaaaaaaagtgcctagatatttatctagcataaccgctttaaatttcacatgcagaagtgtgattgtgttggcgcattatgaatggtagctttggtgttgaaaagtcccctcatttgctcatggcatttacaattagtaaattaaaatgattgtatcatattaacagtggcacaactaaagtttatagtagtcctctgagggctgtggggggagacaaagcagctgttgctgtttgtttatgcaactcagcaacatatgagcgctggtccctcaatggcgctcggcgggctgggctctgcttgatctttgaaggttgctgctgtttgaacaaacctccctgtgtcccatgtaacaccatctgtctcactaggaatgtgggaagattcagcacaccctagcagttgtcataccgtttctgtgctgtctttttgcaaaaggcttttgtgtcattgctgctagaaaaaggctgacctcctaccttgagcatccagagtggatgactgcattttttttccagaattctaagtcacactgcttttttccccttgttcaaaaaggtcagctgtgtttgattatatctttgctgcttttaacttgtcttttcaggaaactttttttccttttttgtccctactccctagcacactactaaaaaggaaaatgaaaagtcgttgaagtctttcctactggcctgtgataaaactgctcaagcagctataacccaagatgttgtctcttacgtttgataatgaatcaaatctgataggcgacacctcaggaaaaactgggcttatatttgctactagcacaatgaataggatatttaaacatgctcatcatgtaatgaaatatttatagtcaaggtttttttgtttgtgtgtttttggtttgggattgggttttttttcttttttaaattttagattgcttcagtataagatatacttttatgctgatacaaaaaaattgataacttttgttgtgtgggggtggtttttcttgagactattcagaattttcaggaaaatatttttttcttgacagaattgtcacattctagcagagaatgttcatattttagaatttgtggtaaacacgaaaaacaacaaatatctttacagttatacttcctcgtccccaaaggttcaaagaaacattttggaaaagacactacagaaataattctaaagcaagtgttggatgcgcatgtgaaagcacttttttttatttgttccaattttattaccaacattatcacttttattgcaactctgaaagactgagcagataaataagcatgcactcaaaccttttggcctgtctgaaaaacagaggccttttaaaaatatttgtaacaaattttctttgttcctcctgcacaaaactgatgtcagtctttctccttttatagcaccaaatgctaacccaaggagcaggtaatcgcaagttcaaatgcacagagtgtggcaaggccttcaaatataaacaccatctgaaagaacacctgcgaattcacagtggtgagtagcagaggtgctggagctcgcatttgcattttacttaattaggggagttttaaaagattgtttaaaatttacacagtcctatttgtagctttttggaactatctatttatttcatcaactctgtgtgcctgatttgtgttcatgagacttatggtacaaccagtagcactgtcttataaaaagaagcagaatgcttacatgtcttaaaaattacaaatgctttgatttattacaaaatctagaggctcctttttgtccttttaaaaccgcttctccagaataaatatttctgacctgaggaaactcaactggcaaattctgaaagatattaatttttgagacctacccatgaaaaaaagggtgaagaattttggataagagctatgtatgataaatactccctgattcctgagggccgtggatcacagaacagaatcctaccactgagatttcctctttataactagtttgatagctctgccaagcattttattaccaagttggatgctattcaaaggactagttggattggtagaatcaatggaatctccacaaagtttattaaagccatggctacacttgcctttaaatactgtgacatctttattgtgctattgaccacacattagtctgacactctgtttaaataggaggctgccgatggcagacaagatttgggatctcagctgaaaaaggcatagatagcccttaccttccactgtgaacatcttgaattatgtcctcccagggcagataaagttcagaaatggttatggtcacataattctaatctaagtacctagaatgtagaggtaccccattgtgttccttttgtttggtttcacagattcttctcttggtagacaattgcaattgttatctaatcaaggaaatgtaacggtaattttaattatcattttaggtgaaaaaccttacgagtgcccaaactgcaagaaacgtttctcccattctggttcctacagttcgcacatcagcagcaagaaatgtattggtttaatctctgtaaatggccgaatgagaaacaatatcaagacgggttcttcccctaattctgtttcttcttctcctactaattcagccattacccagttaagaaacaagttggagaatggaaaaccacttagtatgtctgaacagacaggcttacttaaaattaaaacagaaccactagacttcaatgactataaagttcttatggctacacacgggtttagtggcactagtccctttatgaatggtgggcttggagccaccagccctttaggagttcatccatctgctcagagtccaatgcagcacttaggtgtagggatggaagcccctttacttgggtttcccaccatgaatagtaatttaagtgaggtacaaaaggttctacagattgtggacaatactgtttccaggcaaaaaatggactgcaaggctgaagaaatttcaaagttgaaaggttatcacatgaaggatccatgctctcaacctgaggaacaaggagttacttctcctaatattccgcctgtcggtcttccggtagtgagtcataatggtgccactaaaagtattattgactatacgttggaaaaagtcaatgaagccaaagcttgcctccagagcttgactactgactcaaggagacagatcagtaatataaagaaagagaagctacgtactttaatagatttggtcactgatgacaaaatgattgagaaccacaacatatccactccattttcatgccagttctgtaaagaaagttttcctggccccatccctttgcatcagcatgaacgttacctttgtaagatgaatgaagagatcaaggcggtcctgcagcctcatgaaaacatagtccccaacaaagccggagtttttgttgataataaagccctcctcttgtcatctgtactttctgagaaaggaatgacaagccccatcaacccatacaaggaccacatgtctgtactcaaagcatactatgctatgaacatggagcccaactccgatgaactgctgaaaatttccattgctgtgggccttcctcaggaatttgtgaaggaatggtttgaacaacgaaaagtctaccagtactcaaattccaggtccccatccctggaaagaagctccaagccgttagctcccaacagtaaccctcccacaaaagactctttattacccaggtctcctgtaaaacctatggactccataacatcaccatctatagcagaactccacaacagtgttacgaattgtgatcctcctctcaggctaacaaaaccttcccattttaccaatattaaaccagttgaaaaattggaccactccaggagtaatactccttctcccttaaatctttcctccacatcttctaaaaactcccacagtagttcatacactccaaacagcttctcttctgaggagctccaggctgagcctttagacttgtcattaccaaaacaaatgaaagaacccaaaagtattatagccacaaagaacaaaacaaaagctagtagcatcagtttagatcataacagtgtttcttcctcatctgaaaactcagatgagcctctgaacttgacttttatcaagaaggaattttcaaattcaaataatctggacaacaaaagcactaacccagtgttcagcatgaacccatttagtgccaaacctttatacacagctcttccacctcaaagcgcatttccccctgctactttcatgccaccagtccagaccagtattcctgggctacgaccatacccaggactggatcagatgagcttcctaccacatatggcctacacctacccaactggagcagctacttttgctgatatgcagcaaaggagaaagtaccagcggaaacaaggatttcaggtaaagagacaaatgtttttctgctatgaagaaaagaggtggcaattattttgattatgtgcatgtaggaaaaaaaaatcttagtgaaaaaactcagcagaaacagaagagtttgctttaacatgaacctaaaaccatcagtgggctagaacaatggatgaaacagtggatcactgtactctaagcacatttgctttaaaaacaaaaaggataaagaagaaattaatatttattttgagatgtatttagatggactcatctgcttttaaaattaaactttggtgaaaatatttggtaggacttacctaggtgctagaagttaaagtttataaccgtcacgtgcttttaaagatgtacacaggacaggtgtgatggctcatgcctgtaatcccagcactttgggaggccaacgagggtggatcacttgaggtcaggagtttgagaccagcctggccaacatggtaaaacaccatctgtcctaaaaatacaaaaattagctgggtgtagtgctgggtgcctgtaatcccagctacttgaaaggctgaggcagaagaatcacttgaacccaggaggctgaggttgcactgagcagagatcgtgccacagcactccagcctgagagacagagcaagactctgtcttaaataaataaataaatataaagatgtgcacaacttgcaataatgtatatacacattttaataggtacatttgttttacagagaatggtttattttgaagagtattcttaaaaatatcttccatatttcacatgacttcttaccaaatcttcaaagtagttaataattatgctttatcaaataggaaagcagttatattttaacattatgcagcatataatctttgtttgcaaaataggagcataagtagcagtgcacctctgtaacagctgttccagtattccaatttacagtacatctgccctctttgtaaatgtatttaagcctatttaatcttctctaatattaattagtacaaacatagtctaagaaaactgaactgtgggctagcaaatggaaatgtatgttatcatgcaagtttgcactcctttggatcaagacaaaataaatatcaagaaatttaataatttactgatccacattcattaatgttcaatgctgaaggctgttttaacatagaacattgataaaaagtgttattaatattccctatttcaaattagaaaattaaatataaaaatatagcttgaggcctttagttggtagacatacatttaaatagattgcataataataacattttgtacctaaatataaaattcaattaaaatcgggtttctacagctacagatcatttctaaagttaagcatactggaaaatacacaaatttcaatgttaaattttcacttatgggtatttcttggtataaaggaaatgaaggattttagaaaaatttgtttctctcaccttcagagttgaccatttcctgtccttaaaaaacagtgagatctaccttccagggcagagaagtttatatttttgttgcgtatattgttgcatatactgcatattgagacctcatatattgttcatggaaaaaaaaatgtttaactcaatcaattagtagcaagcaattttgaggttctccaaatgtccccctatgtgaagttgtttggtgtgagcacaaagagaagccactgtattgaactgtgtgattctatcgcagggagaattgcttgatggagcacaagactacatgtcaggcctagatgatatgacagactccgactcctgtctgtctcgcaaaaagatcaagaagacagagagtggcatgtatgcatgtgacttatgtgacaagacattccagaaaagcagttcccttctgcgacataaatacgaacacacaggtatgagtgactttgcctaactggttagagcttcccgtcctgctgtacatttcataatatttaatgagcacacttgtgcaacataagatgtaacatatgctgataccttcaacaaggaagaaataatgcttttgccgagctcagtaggacttttttgttgcctgtttattggatcattcatgtctttatgagtgtgcttgtcttaatatctttccagttattctgtaaaccaaatttagaaattatgtcaaagggacagtcagatggccagggcaatgaaatggcatgacacagccagttattgaaaataccttcaaattcttaagtttcaaagcttaagatgaacctatatatgtaaaaatctaataagaaattcagacagtaatacattagtttcatcatccaaaacaccaagaaagccataatttaggggtaattttgtttgccttttttttttaaattcgccacattttgaaagaactaaaggcattagtgtcataaaagaaaagtaatagatcagatgagctacttgaaaccacctatatttggaagattgaaataaaactttctaaattttaattagtatatttccaattcatgcattactaattaggaacaattacaaagagttgacaagaaaacagcctaattcttcactatgagtagagagatagtgggttaatttttgaaaagaaagatgaagtaccatatgtaatttaatattacttcccacaatccaagatctgcagctctatggttgagctccacttgtgtttcctccctggctccatccccacctccctgaacaataaggtagctgaacctcatccctacccctagcccatctccaattcttctccactggaaatttggcatgctctattagccctggatcgggggggaaaaagtgtaggatctcagtcaaaattttggcacgagggaacaaaaaaaataggggagtataggaaaacaactcattctaaaccaggaagtctagtatcaaacatttcaatatggaggaaaaaaaactagcactttggggggaaagctttttgggggaaaagcgatgatgaggcacaaaagaaaaagaaggaagacagaaaagggaatatgagccaggcgcagcagctcacgcctgtaatcccagcactttgaaagaccaaggcaggaagactgcttgagcccaagagtttgagaccagcctgcacaacatagtgagaccttgactctacaaaatattttttaaaaattagctggatgtggtagctcaagcctgtagtcccagctacttgggaggctgaggtaggaggatggcttgagcccaagaggtcgatgctgcagtgagccatgattgtgccactgcacctcagcctgagcaacagagtgagaccctatctcaaaaaaaaaaaaaaaaaaaaaaaagcgaagggaaggtgaatacttcctgtcatattttgactacctagatacaaggcactcttttctgtcactgaaaactgtccttgggaagtactcgtactcatcatcggctattattcctcactgggcacatgctggaggcagctcaagtgaccagcatcagcctgatagtgtggggagggtttttgtgaagcaacaaggttgataaataacagggttcttactccaaccaatacagttttctttttctttagctgtctgatattcattgttattattttaaaagtttaatgataccttaaagacaacccaatctaaatccaaacagcttttatacttgtgttatataattcaatgtttgaaacatcaaaattttcttttagtgtagatattttctttagtactaagtgctacttaagcatttacaaagtaaagatattttcatacctaaattttactttaattttaatattttaatcaaccttaaatatattttgtattccattattcagctacaataggcacatcactgaaggcatctttccctctctgattggttttattatatgaccatatgcaaactctatcatttactacacggtgagtgtacaacttttattttagtgagggctgtcatacacattgacatccagtcaatatatttacttcttataaattagagaattgtaaccttcataggtctgtagatagttgagaggcccaaaagttgacaaacacaaatatgcataatttatttgaaaaataaacttcaggcctgatgcggtggctcatgcctataatcccagcacttttggaggcagaggcaggtggatcacctgagagcgggagttcaagaccagcctgaccaacatggagaaaccccgtctctactaaaaatacaaaattagctgggtgtggtggtgcatgcctgtaatcccagctacttgggaggctaaggcaggagaatcacttgaacccgggaggcggaggttgcagtgagccaagataaggccactgcactccagcctggccgacagtgtgagactccatctcaaataaataaataaataaataaacaaacaaactttgttttttaaagtaaaaataaactattctgctccttcaagatgtgagagctgctgcctcgaaacattgcctagcaacaagatgctaatcattcaatggttgctctaaacttgtgattaattatcttcctgttggctttccaacttgtcaagtttccagcatgttaactttttggtcacttgaccaaacatctcatgacattactactgtcagtgtattaggttctattcaaatcaagttcttcatggattttctattgatgtgatgtatgtggaaatttagtccatgttcctatcccaattgaacctgtgggatagttcctatcccactagcctttcatttgtttacattaagcactagtaatattttgagaatgcactaagatgaaaattataagtgagaactgtcttgggactgactgattctaaggtcgggaaataaaattgaatcatcatttcattatgcattgattatgaatgtgtccttggtaaagtgtgtttgtgatgtctgtctacaattttacatatagaatcgtttaacttaagaaggaaattatgagctacttattcttgagacccagtgctttttttgcctcaatttatttcctaggcagataccaaagtcatcatgcttcatttttcttaccaatggcttattgcttgcttgcttttcctgggacctgggactgggacagaggagggaaacactatgtaaatgttgacttcaacagaattaattgtcacaaacaaggactgtgaaattaaaaactctgaaactcctgttaggcactgtcaagaactcatttgtattctaaaatttaaatctgacctttattgagtgctttctctgttgagacatcatggtaggtgcttttgaaacccaccttatttagaaaagtaatacaaatgtttctacttttgagtagataagtctaagttttaaataaatttaccagtcaatcttgtttctcagttatatggtaatttttttcataccacaaacctttcatttattattaagttcagttaccattctagctgtcaggtgaatcacaaatctagatattagagaaaatatttaccctaagaaagcttgattcactcagtatcaatttggatgttctgaatcttggtcatgtggaaatttaattctaggacatcttgatttgaatcaggtaaaccagcaaaacaagttaaaaagagatgaatgtccaagtcagttactatttaaattgaatttattaaatgcttaccactgaaacttctggagatcagtagactatttagtgtaaggtatatgtcaaaactctcacctgctcccagattctatcctttgcatggtatcataactgaacattttattttttcaggttgtcaattcataatgcaggattaatatatgcgtattataagcatactgtttattatcgaatgagttctctgaaaattgaatgtctataaccaaggcatatctctaagacagactgcagtttagtgggcatgcccgaagcattgctaacgggccttgaaacctataacagaggatgcttgctctctctggacactgctctgtgttttgttgctttggaaaagaaagccatatcataatgttcattcaaaattattcatacagtctcttccagaagttacctaagtagttgacctttttgtgctcctgagctaatgagacattagtatccaaaagaggttgtaggacagtttgcccatacacgccgtagcaactagagcatcaagaaaattttcatctataatttctcttctctctattcagatttattacttccatgtactctgctcctgctgcatgcgtcctacttagaacttgagaaattattgaacatgtattaatgaataagaataacatgatctaacattaactgactgcctactatgtgcaatccttgtactaaatgctttatataagttgtcttccttattctttatgcccagtccatgagttaggtccccaaatgatcttccttttacctactgatcctgagagaagttaacatgcctgagaatgcacagcctgtcataaatgatggatgtgaacccagataatcatattcatttaacactgcccctatggatgaattgctgcgactagaaacgtcttatcctttctcctgacagcatcctttcctttaaggtccaagtccacacaagtgagaccaaattcataacataatgacatgaagtttcccgggagacaaaacctcttgtctttttcccaaatacacgtctgcttcctcttaaattaccttcctaccacggtgtctttccaaatggaaaagcatgctatctttgcagactcttggcactccattgggattctctgttatccagtttacctcattcaaaacatcttttccaaaagttaaggaatggttcttgtgtggtttgaattatacttgctttcttcagagtatgagctaccttgaagtaggttattagaactgtctttatttcccatataactagtagtcaccaacaaatatctttctgatttccactcttccagttaaataacttctttctactctaatattataccttactacatttatcatcactaaatttctagtggacattccagttaaataaagaccattaatgaaatgacatatagcagtctacagcactttccgaatagtggcatgccctggaggcattcaataacattattaaagatatttaattactgattgagattttatatcaccatataactgaatacctaaagtgtatagaatgggtccctaaacttataacatgacacttagcaaacgaaaatgggattggatctactttgttgggttttaatttaatttgctgaaatgcaagtttgtattaggaaataaagcatacaacttcatatatgttacagtgatccatggcactctacatgacacatttctgactttaactctggagcatcaggctgataatttttttttatcagttctattttggaaataaactttcaagtatggcagctatggaaggtgttgaaggcattccagtgctatttgtggcctggaatcaaccagatgtgtttaggcttggcactggctttaagttccaaacactggttagaaactgcctggaatgccaaaggaaatacagcattccctagctgaagagtattttaacactcaacaagtggctgacatcttatggaaaactttagagggaaaacactatttggaatcagttcagcctccatgatatacaccctcctaatttgtattttctaatggtttcttctctgatttttattcttagactcctatgactgataagacagtcttgacatcctctttcctctgtttcttccactccctcctaacttggcagtttgctcccatttaagacctaagatcccctttcaaagcaactatctcatgatataacaagcagaggatatacatgccaatgccagcgatgatgccatctttatcacttttgtacaagtctttgttttaaaaatgtaaggaagagaattacctgatgaaaacatgtgctagatcactagaaatgtcttgttgaatagaacatttttccaagttttaaaatgagacaattagcaatggaaagcttcctgtctgagaattttcctccagcagctttctaagttcttcttgtttattaactacattgcatcagcaagcattagaaaaccaaattgtgggatggaaatgcatcttcctaactctccatcgattagaccggggtgtgttgatctttcaggcataagtacacacgcttatgcctgagtctggactcgcgtacagaattagtggaaagagacttcatgcaaagacactaatcaccctgtcatcttgttctttctcccaggaaaaagaccacatcagtgtcagatttgtaagaaagcgtttaaacacaagcaccaccttatcgagcactcaaggcttcactcgggcgagaagccctatcagtgtgataaatgtggcaagcgcttctcacactcgggctcgtactcgcagcacatgaatcacaggtattcctactgcaagcgggaggcggaggagcgggaagcggcggagcgcgaggcgcgcgagaaagggcacttggaacccaccgagctgctgatgaaccgggcttacttgcagagcattacccctcaggggtactctgactcggaggagagggagagtatgccgagggatggcgagagcgagaaggagcacgagaaagaaggcgaggatggctacgggaagctgggcagacaggatggcgacgaggagttcgaggaggaagaggaagaaagtgaaaataaaagtatggatacggatcccgaaacgatacgagatgaagaagagactggagatcactccatggacgatagttcggaggatgggaaaatggaaaccaaatcagaccacgaggaagacaatatggaagatggcatgtaataaactactgcattttaagcttcctatttttttttccagtagtattgttacctgcttgaaaacactgctgtgttaagctgttcatgcacgtgcctgacgcttccaggaagctgtagagagggacagaaggggcggttcagccaagacagatgtagacggagttggagctgggtattgttaaaaactgcattatgcaaaaattttgtacagtgttaaggcctaaaaactgtgtggttcagagactaattcctgtgtttaatagcatttatactttaagcacaactagaaaattgtaagaattgcactctacttatgtatcactacaaactttaaaaaactatgtctaatttatattaatacattttaaaaaggtgcccgcactaccatacatcagtatttttattattattattgttattcctttttaatttaatgtgctcgcactacaatgcatcagtattatgattcctctgtactttcctttcgctattcatcaatttcccattttttttttcagcttaagtaaccacacaattttaggcctcaatttttttttttttctgtgaaggaacttgaagtgatgcatgtgtgaatttaagataccgaagtcttaaagtgacctggacgtgaaggaaaaagtaagatgagaaataaagaaagcctttgtaaggtggttttaaaagccttatatgcaaaccttttaatctgtgtttctgcaagtgccatccttgtacagtgttaagagggtaacatgggttacctttgcaccagcttcagtgttaagctcaccctgttctttgaagcacccatgtcagtattagaagaataggcagcagttccttagtttacatatgtttgtgcaattattttctgtacttttttgttcattaattttgtcagtattacaccaaactgtttttgcaacaaaaaaattttttttgcattcatttaattttaggtcaaataacattttatttatgtggctcattttatatttcctaattttatttatttcatactgtagtgtacagtattatagttcttcaatatatagatatattttagtaaaaaaggaacatgacgttgatcatttgggcaaattttacgtaaagagaagagcatttattgtgttttggaacattaattgtgagatgggatttttcaattttattattttatttttgtttttttccaattactggaaattccaaatttgggaacttttgatacgatcttgtgaaaacactgtattttcgactgaaaattccactttcttcatcttgttttttagctaaaaagagggactgttaaatacaatgtatgataccatgacaaaaatctttcctgaattgtctttgtaaaagtattattgaattttcaatttgtaatttcttttgaaaatgaccatgctcgaataaaaatgtagccaaactaagaatgtagttaatga

SEQ ID NO: 121 - DNA, 37379 bp, Homo sapiens
aagagtggctggattcggattttggagtgagacggagcatgaagacgctgtgtcctgaggcctttacattctcatcttacttatcccttgtagcgatcctatgagggaggggttatccttactttacagatgaggaaactgagtctgggaggctcaaggaccagctcgtccctgtcctcctgctccctagacccagctggtctcagaccctgcggagctgccatcatctgcatctgtgccctgactcttcagcctctctccctggccttctggagacagacctctgaccggtgggctccatgtgattctgggctccaggacctctcccatgaagatgaccagcacttgctgagtgcggtgtgccaagtcttgtgcaacacgtctcacacagcgtaacgggcagtgtggcaaagtggataaggtaagggttcaaatcctggttctgccactttttacttgcacgggctcgggcaagctgaccaccctgtggctcagcctccacatcattcacctcgagctgatggtacccactgcacgggctgctgtactgattgtgagttcatccacatgaagagctcagaacagtgcctggcgtggcaagactatacaaggactaactctgatggtgggagccaggaggtttccttgtggtccttgcctggcagcatcttcctcacctgggaatggactaatgcttagcccactccaggctactgactctgaaactctgtgtgtggggcccagggatctgcattttaacaagctctccattgaggccaatggacgtgaaagcttagtctttctaacacctctataagaaggtctattttgttctcattattactattacatggataaggaggtgggctcagaggggttgtcatgcctaagcttatgctggtactaagtgccaggatgcaaagtgggtcagtccactccacaccactgtgcctggcccagcccttcccgccagctcgacgcacttccctttcccactggcttcatttcctacctggccaagcctgtcgggggcaagcatgcctctcagtccacaaacttagggaggcagggaataagcacagggtgatgaaaactcaatccccatccattcaaggggttagagacctgatccccttccctagattgcaccagaactgttgaggacttacacagtgctaaggcaccagggtgggaggcccacctggtcctcatgccacccatcagtgctggcatccactagccttccaagagagccctagatcttcatccctacaggcagaggctgggacagtggaccactttggatagttaaccagcttgttcactgcacaaacatatccggatggggtgatcagtgggactgaaatcccacctgtgctgtccttgctgagctatggaagtgggtgcaggacagcctccaccctgaggcagggcatctcttccttagcaccaaggaaccatccacggaccaggtcatgcacccagtgggctcatccatcttcccacaaagggtgccttttcccaatttgcacaaaggaaccttagagacggatgtggccctgctggtgtggccccatgctggtggagtggctcccacaggtctgcggtcctctgccacttccaggtggtgctcaggcccctggcctcactcaggctgggggagatggggtgcagggcgagggcatggaggaaggctatcctgggccatgctgtggcccttccgctcaggcccacaacttccccaaggctacctctgggaagtagggcacaaggggcccgtgggatcgttgcttggatcccacaacataactggggttttgctgtctcctggggctctgcccaggaaggggtgcaaatctcccttcactatgacccagggctgtgcttccattccactccatcacccctccttcaatattttcttgcctctgcggaaacccaacgctactcagccttccttcaggattttctccccaacttttttccagctagaagtcttccccgagttcctaaaatcttggattttggagaccagtcaggccttttcttttcgtctagggcataggcttcccttcaggcagtgagcagaaggaatgagctggggtagggggagagggaagagcagatctattaatcgccccaccccacaataactgcacatgcctgggagccccgtggagcgcaggccacaccgtgccaggtcctccgagtcgggaaagactcgctattcccgcttccccagcccggagcaggggctaatggaaaaggctgcagcccccggcgcgcgcagcctcctgcttcttggactttggtgaaattgtggctgcgggcccgcgctgcttccgatccacggcgccgctcaagcgaaggctcagggggtcccccgcccgaggcggccccagagccgcccctctggtctccatcccggagcagcgcccttccaccctccttgggcggcgctgccccagcggccgggtgttttcaccgccgaccgcgagcttcctaccgttcatccatccgccgcaggaagggggcgcacgcgtcactcgcttctctccaatccggctacatcccggagttcggttttcactggaaacgacaccaccgggggttgatggtccctaaggtgttcagcctgcgaaagagggctgtggttaaaaagataaaaatacactagtgccttaccgggtcctgagcaatttgttttgtattaggtcaattctagaaaaaaaaatttacaggtcattttttttcattcaaagtaaaaactgttttactgaatcccatgatctatctatccagatatcacctgtgtaatctaagctggaagactatatatatatattctattgaatagaaaaatgtcaataagaagtgaagattgcaggacttttatttttgccattaagctattaatagaaatgcatagttgttaatatgttagcaatgtggctttcaaatttttattgcaaaaaataataaagtatacactgctccttatcataaattccaaatagcaaattgattctggcagaatggttttatcgatttttgcagaactctggtgttcctagtgcatttatgattacagttgacaaatgaatgcagcaccatgaatattgattgatatttttgtttaccttagcaagaaagacaaaggtgaaataactgagaaatttcatttattcttcatcatgatgtaacttctttttaaattttttttgtatttttaaattttgttaagacaggatctcactctgctacccaggctggagtgcaacggctcaatcatggctcaccaaaacctcgatctcctgggctcaaggaatcctctcacttcagcctcccaagtagctgggattacaggtgcatgccaccatgcccagttaatttttgtattttttgtagagagggggttttgccatgtccaggctggtctcgaactcctgagctcaagtgctctgcatgccttggcctcccaaagtcttggtattacgagtgtaagccaccacgcccagctatgaagcaacttctttcctgatctggatacaagtttcgagacaccggacaaacatttcctcacgtttttgtgctgttcacaattcaatagctagacacacaacataccactaaatttaatctgcactattaacatactctccactgcttttaaaggctagacaatcaacaaaacatcaaatccacaaaaacaagtcattggctgatttctgtgttgtaaatactcaagctaccaacacgatgtcagtgaatatggagtagggtagtacacattaaatggcatttctatggtgcaggcacactgctcattcataacttcaagagcagatcataggaaaatgcagtgaaatactgaggaagtgatacgttttgaatatgtgtttgctctttttgtataattagttgtaagcttctataattaatttttaataatggctgtgtttaacaagtggttcataaaattctaaaaatttaacagttggcactcacaaacctgtgggagccaaccgcagtgcaccactgccaggctcctgtgacttctggcttccacagcgggaagtattggcaagagaagggaggcttggatgaaggaagaactgggttttcctcctcttgctccctcctgggatccattctgctcctcttttccagcgctctgggcttctccaggctcagccaacaccctaaggcgctaacggcttcttagcttcttgctcttgctggtccctggtgcttcctcatcccatccatccccatcccatcaatcattcccttccctctgagtttgcctctgcttcctggccagaccctgcctgctcaagtctgctcttgtggtcacaactctaatacttctagtcacttcacccctccgagcttcagtgttgtgaggattcagtatgaagcagcaggatattatcctgaaagagtagctgggggtacttcccccctcccacctcccggccctgctagttcctgatcccctataactctttccctaccggggcagctgcatgctggagcagtcaattcctcagggacaggatttacagcagaaatgggggaaagggttttgagtttcaaagtccaagaccctgaagggcactgggcaaagaaagactaatgagtcactgcaaagtgtcctgctgggactcactggtccctgagaaggctctcccaccctgcagggctgccccctgcccagccaggggatgtgggacagcagaacccgttagcgtggggagtcaaagagctgagaacaaacagctgcagcggagtccaggcaactgtgagagccgcccccccgcaccccaatgtcccagaggggcccaggaccggcagggtctccacataggtttgggcgatgacaccacagcagctctggtgtttgacaagcaaaggccaggtgtcagtgtgcacctgggggaatgggaggatggacaatgatggggtgatgggggtccaaatccccctgtcccacaccaaggtgaatgaacccaagcactgaataaacccactttccacccccacttagttttagcagaaaaggacagggaattattcattgaaagatattaatttctaccacctacagaatgggatctccaacatagggtctctagaaaaaggaagggccactttctgccttgcttgtgattggaggctcatggctgtgacaaggagagcactagaagctttgtcagaggccctggaccagcttgctgagtagtccacctttccatgccatctgtaaaatacactaactgctggccctgccatgaggagccctctggccagtggatgaccgtccaggtctcgccctgggcacttgtgttgccacaagttcaagggcaccccaaccaagggtcagctggtttgtccctgtgagccttaatgacacttatactgagaactgtcattcataaataactgccatgaaaactaatgaaatgcaagtgtacaaaaaagagctgtggtttccatggcaattaaactgaatactttcttagggaaatgctggaaagaaacagctgtcacattaggggtgtgtgtgtgagatttgtaaaagttcggggagatgttagatgtctagaaagttctgtacttggagcactttatggtctctaagttttcactccaaatgaaagaaattcgttttggaaaatgtaatgtactatgagggtagcttgtataagaagggcaactgggactcctgtcaactgacatcaagagaagtattttgcacattaaaatactggtaaatggatatatatttatgttttaagttaaaaagattatttaggctgggcacggtagctcacgccagtaatcccaggactttgggaggccgaggtgggcggatcacctgaggtcgtgagttcgagaccagcctgaccaacatggagaaaccccgtctctcccaaaaatccaaaaaaaaaaaaaaaaaaaaaaaaaaaaaattagccaggcgtggtggcgctggcctgtaatcccggttactcgggaggctgaggcaggagaatcgcttgaacccgggaggcggaggctgtggtgagccgagatcgtgccattgcactccagcctgggcaacaagagcgacactctgtctcaaaaaaaaaaaaaaaaaaattaatgcacatgtatgtgtaatgtatatatatgagatgaggcctctctctgttgcccaggctggagcgcagtgccacaatcaggttcactgcagccctgaactcctgggttcgagtaatcctcccgcctcagcctcccaagcagcgcgtgtgacaccaccacgccaggctccatatatatatatatatatatatatatttttttttttttttttttttttgggagagacagggtctctctatgttgctcaggctggtctcgaactcctgggctcaagcgagcctcccacctcggcttcccaaaatgctgggattataggcctgagccaccgcgcccggcccatatcgtttttttaaaaatagaaaagccaccaatctccagggcctcgggtaagaagtcgctccaaaatcgccagcaccacagcaactcaataggcttctatttccatccaccaaggccaggacactcgtatgctcccggacgccctctccggcgtcccttcgctgagcccggcctggctagcccgccaccccgcccgctgttacccgactgcccgcaccgaccacctgcggccgccaaggtgcggcagggggcgctgtgcggccgcagaggccgcgccgggccgcgctctgattggctggaggccgcggccctcgcccaggccgcccgcccagtctgcccgccccgtccgctaagtgcctgggctctcccgctcgcgtcccagtctgcgggcctccggggcagcggcgaggccggagcgtcgcggcggagaggacgagaccgggacaagaccagggcaggagggagccggccagccgcgagaaccccgcacgcccggcaagatgctgtcctggcggctgcagacgggccccgagaaggccgagctccaggagctcaacgcccggctctatgactacgtgtgtcgggtgcgggagctggagcgcgaaaacctactcctggaggaggagctgcgcggccggcgcgggcgagagggcctgtgggccgaggggcaggcccgctgcgccgaggaggcgcgcagcttgcggcagcagctggacgagctgagctgggccactgcgctggcggagggcgagcgggacgctctgcggcgcgagctgcgggagctgcagcgcctggatgcggaggagcgcgccgcccgcggccgcctggacgccgagctgggtgcgcagcagcgcgagctgcaggaggcgctgggcgcgcgcgccgccctcgaggcgctgctgggccggctgcaggccgagcgccgaggcctcgacgcggcccacgaacgcgacgtgagggagctgcgcgcgcgcgccgccagccttaccatgcatttccgcgcccgcgccaccggccccgccgcgccgccgccacgcctgcgggaggtgcacgacagctacgcactgctggtggccgagtcgtggcgggagacggtgcagctgtacgaggacgaggtgcgcgagctggaggaggcgctgcggcgcggccaggagagcagactccaggcggaggaagagacgcggctgtgcgcgcaggaggcaaggcgctgcggcgcgaggcgctcgggttggagcagctgcgcgcgcggctggaggacgcgctgctgcggatgcgcgaggagtacgggatacaggccgaggagcggcaggtccgtgcgcggggatggcgcgctgaccccatacccgctgccgtcgccccagcaccctgcccttgacggcgtggggcagcggccccttcaccaggggcgcggcgtcgcggaccggtagggcccgcccagagggtgcccgaatggcatggggacccggactcggtccgctggtccatcgactcagcgggcgagcgcggggcggcaggtcctagcggatagccccgtcctcgtcatggggttaggtggcagctgctttaactcttgacaagcgtgactgggcgcatcctgataggccaccctgttagctctaggttttccttccattttccgtgctccgtagactcagtagacccagatctaagagtcaaccgagaaacctctctcacttgcagaagtgacggcttatggtagccccgctgtctatagcgctcctcaggggaaaactcaaattaatttccaaaacggtttttattttgccaatatgatttcccagttggaagccgcagttgtggctctctgggcggctgccttgtttgatcttgggaggggcagcaaccctcatgcagaacagagcttgatcgaagatgttttgctcacagcacacgctgacgtcagatctctgcgtagtgtaaaagttgtgggaaagtggggccctttggcaggatgttattacaagtgcagagtgatataaacagttactatttcagggaagcaaaccctctgacaccggcggggtgacacctgtggctgatgtaaactatgcccagtccagccctagcgtttggccctcgccctgccctgcctcagccagaattggaaatattcccaaatcacactatcagtagttctcaaaaggacagatggaaataacatctgcacaatttcacaaatattttaagagtacagtttgcagctgtgagttaaagatttgagactgacttttaaaaattagaagtgagaggaacatgggggttgtcatatggaatgactgcggtgatgtgacaggtatccacaggtgatgagtaaatacctgttgattctccctgggtccccagcactgccctagactttcagtatgcaaagagctacaggctagatgggaaatcatagaatgcaatatggtactacattgggatttaatcttttgagttgtgggttttgtttggcttccgcctcataacttttcaaagtgttctcttggggctttgccatagctagagcagggacagggactgacccagtgtgtaccgatttccacttgtgagcacttgtgtccctttgcaatgacagtggccaggggtctgagttccacaggtcctatactcgttgttgagtgaaagttaaaaagtgccttaatgtggcattcatggagatttgaccagtggttattttgactctccaaaaaggagtatctgtcaaacctactgcccagggaacccctttgtagggaaccctcgctaccaactcaggggtctgtgctgtgcaggcaggtttagaaaatgctgctttgagccacgctgtgtggaccaaatcgtcaccatgcgttcacagccacagctcacttggcacatttcagaccttcaaattctggttccagtgttctttcttagcggcaaagcccttttccccactaatgaaaccttcagtggaactcgtaatgtgagccatatgaaagcagagttcccctgactggaggagacatggggacttgaagtgcagttagaatcctgtgcagccctcctttgacacagggactccagggcccaccggggaagtgcttttcctgaggtcatacctgccctcagagtgaggctgggaccccactctccgtttgccatccagtgatacttctctcttgttggaatttgctgctttttcctaaaagcaaagagcgaggaaaatgtcaataaggacctggtttttttttttgttttttgttttgttttttttttggttttggttttggttttggttttggttttttgagacggagtcttgctctgtcgcccaggctggagtgcagtggctgatctcggcacaccgcaacatccgcttcctgggctcaagtgattctcgtgcctcagcctcccgagtagctgggagtacaggatcccaccaccccgcctggctaatttttgtatttttagtagatacagggtttcaccatgttggccagcctggtctcaaactcctgacctcaagtgatccaccggccgtggcctcccacagtgctgaaattacaggtgtgagccatgtgcccggccattttttttttccagttccaatttgcagaggttttactgcactaagtgttaccagtcactaccttgtccatatactgaatcttccctcagttaacttaagtcaactccatttcaaattgcattccagaagattcagcaccaatcacagagatgctaggaagtttgtgaaagagggagtatggatgatttaaccccaagcctgtaatttttttcgggttctgtagaagcttactatggggagagtgaaaaaatcctaaaaatgggttgaattagtatatggtaataaatatcttattactaagagcctttagcaagtgcttcgtgtgtgccaggtaccacagatgcccttcacaaatattcactctcagtgcccacaccagtgttacgaagtgggtactaatataagctccattttacagaggaggaagctgaggcacataagtcacctgattagtaagtagttaagccaggattcaactcaggctctagtgcctgagcaactgaccgctgggcgtccgtttctctcttctgtctgtttgatcagagagaaacctttaaccagtattcttgcattcatagcataatgataattgctcttcctaagggctagcccgaggtactctgctgatttcaagtcctaaaatgcttttagacccctccagctggctgaatagttttggcattaaaactattttctttcatttctttttttctgtgttccatgtgctttaatgcccccctcccctggaggcaggagctggaggcagcagagggtgctgccacattgtgcccagctctccctgcctctggctatagcttctgtggctcaagggggaagatgcttgctaggattctacttgaggggaaactggtccttcccagatggcccatgcgccttcactgtatgaggcggtagtcattggcctgccccaggcctggcctcagatttgcccgagaagagtttgctgaactgacatccaagttcccaaatgtgatctagatcacttgaagcctgagtgacacacccaggctgcaggagggggcttcagaaaacacttgaagacatttgcgataaagtggagaccagcttcaccctgcaaacacggagatttttgcttatgaaagtgagcccttagctgctgaggctgactggaaaaggcttccaagcccccaaaacatgattgaatgaaagctttttgtagatgggaaggtggggtgggattaggatgggattagctaagggtcagtgctctgcagctgtcctacctggccctgaattctgactctgccgctctttgggcaggttacgttccttaacctgtctgcaattcagtttccccatttgtgaaacgaggtactggaagtagctcccagggtgtgtacaactggttcattcgttcagctaacagccgttgagcatttagtgtgccaagctcagttcttcatggttgcagattcagcagtgaaaaatgccacgtaaaacaaagaaagtcccttgacctgagaggccttcaggtggaaacagcgtgtggtttttcggggatgcctcagccaggctgccggtgtggctagggcacagtgaacagggggtagagtggccactgcaggacttgggcatttactttgagtgccatgggaagccactggaggttctgagccgaggagagttggggcctggctgtggcttagtggaatcactgttgctgctgttttaaaaatagactgagtggactcagggatgccttcagagattgttgcagtaacccaggcaggaagtgctcgaggcttggaccaggggtctcagaggggcccctgcgttcaagttgaagccaacggcatttgctgccagattgaatgtgatgggagagggagaaatcacagtggacttcaggcgttgtggcctgagcaactggaagaagggactttccttgttttacgtggcatttttcactgctgaatccgcagccatgaagaactgcgcttggcacactaaatgctcaacggctggtagttgaacgaatgaaccaattgtatacaccctgggagctacttccggtacctcttatacgctttactgcggggcattggttaggaggacgggcctgggtgggagattcaagttccatgtacgtgtgttcagtttgagatgcttcttacacacccacctggaattgtaaaatataacttgagttcagggtgctgtctgggctaagctataaatacttcgtcggcatccagttcgtgcttattgttatgaatacatttaatttttgtgtgtagctgaagttatcacagtatttaaatcccctggagctctacctttcaaggttgcaaatgacagtgatatttgtgaactgtcccacaggcttgctcagtgagcggtagctcaagtttggctaagagaaaattaattcttttgatactgacagcagcatgcctttcctggtgtggagcaagatttcatcatcggttgtgatgctgcccaaaagttctctaaatagcaaaaaggtgacctctctcccaagcttttgcagcattaggtgaaactgcctctgctcgggtgagatgtagcgtcccgtgtctggggctccagtgcctctgtcctgacccacagcttgctgactggccaagcagagcccaagtctgaagttttattccacagcaggatttgttgtgatttctgcagagaccactgggagccagttaagtcttatattcctgcttccaaacgtcaactaattttcctttgacaatttaggaggagctgactcacatggaaatgtgactgaaactgtacttattccaacttcaacacagtttgattttcctctttgtattttgtgggtgcagaactattctgtgtgctctgggaggagtatcttcctgcacaccccttccacgtgactaggctttcttgacctgctcaggaggtttgtggttggagagctttcatcgtattttttttctaagcagtttaacaacatttgaacttctttgtaaggaataaattactataaatttttaatttgtaatagttatgtcaaatttcctgtagtaggaaggacacacatacatacatacatgcatacctacagcccatcttgtatgagaaccttgtacctgaattgtattccctctaaaacaggggaatgtaggattttgacattgagatttaactctagaatgtgtgaatattgtggctaaattgtggcagtgctgtcacttacatcaagactggcagttgctctttggtgagcttctctgtttgtaatgccagctgtgggatctgttatcgtttttccaccctgggacataagccagtgatttttaagtttacttctttgctttaaaagctaaggggttttaaactacttcaggaccctttatattcagggaacctaacagccatcattggcatagaaatagaactgttatgagaagtgggaatatttattggctgatcatgcattttaaaaaatgataaattctggctgggtgcagtggcttgtgcctataatcccagcactttgcaaggctgaggcgggaggatcacctgaggtcaggagttcaagaccatcctggccaacgtggtgaaaccccgtctctactaacaatacaaaaatcagttgggcgtgatggcaggcgcctgtatacagtcccagctacttgggaggctgaagctggagaatcacttgaacctgggaggtggaggctgcagtgagccgagattgtgccattgcactccagcctcggtgacagagcgagactgtctccaaaaacaaacaaaacaaccaaaaagataaattccatgtgcaatcttgtagagttcattccttggtttcacagacatatttattatggaccctcagcatcttgccgggtgcctttggtgaagggattccagcagcaatgaacataatattccctctcccagtagtcttaccgtttttgaattctacaaagataaatgtttataggtctagcttagtttagttaatgatgttcagaaataatgctacttcccattacaaaccagaagttaaaagtacatggacttatttcaatgtttaaatacttgcttggttaattgttccccagagtaactaacaactaggaataaaacaaaactggaaatcggtgcagctgaagcccatatgtttgtttgagaagatactgtcgacttcaaatagtacattttgaggagggtgatatgatcttgatcatttcattttaaatttaattgagcagctatgtgctgtgtgacttgtatgtggtgggcactggtctaggtctgggattcagaaggccgcagtatctccctgccaggtagagaggcaggtcggggacccggccaggggtgaggggagctgcgaggagcacccaggacgcccttactagctgcactgtgcaattacggttcataaagcagttttatttatttttattttattttttgaggtggagtctcgctctgtcgctcaggctggagtgcagtggcatgatcttggctcactgcaacctccgcctactgagttcaagtgattcctgttcctcagcctcctgagtagctgggattacaggtctgcgccaccatgcccagctattttttgtattttcagtagagacagggttttgccatattggccaggctggtctcgaactcccgacctcaagtgatccgcccgcttcggcctcccaaagtgttgggattataggtgtgagccaccacgctaggcccaaaaagaagttttatatctgagtctgtagtttgtcatttatgcccagaatgcatttctccccagatgatcttaaagtagcttttctaagtgaaacaaaactctgtatcagtttacctgcttattgttggagaaatcatgactttggggagtacatttcagttcaattctgagtgacttatgttttgaatattgtaaaacccctgatttctagtcttggcttattttccatagcgtcttagtgactggtttgaagcactggctctcctaagcagcctgatgtctaaacggtagagatgatttgaataaactcctaagcattcattattaatagagagtctgaacagagaagccagtgtcctatcaaaatgttccacatgcaataaaaaacttccatatggaagagatacaacattggaaaccatcctgcaagtgactgcatgtttaataacgccgggtgtttttctggtctgctaataaccctggtctgtttttcaattcgatcctgaattgttggtaccttcagttcgacccagtaaagctccagttctctgatataaaagtctgtctattctctttagagagtgattgactgcctggaggatgagaaggcaaccctcaccttggccatggctgactggctgcgggactatcaggacctcctgcaggtgaagaccggcctcagtctggaggtggcgacctaccggtaaggagactgtgctgagttggccttgacgaagccatgggggtgtaacttgcacatgaaggaaactggtctagggaccgtagcctttgtggagtcactgtggctttgtgacaagcagagagcagcccttggcatggccaggcaaggagtccgaggccaaaaggaagaggaagagtagggcttgcttaggtcactgagcaggtgtctccagcaagggagtagctgagccgtgcccccttacctagtgtttgtatgttctggggactgctgaagagcttcacacatgtcaacgtgttggatcctaggaactggagactgtgtttacagatgaacagactttgctcagagaagttacagaactggaaagtggagggccaggatgtgttagtgtgttttcacaccgctataaagatcctacctgagcctgggtaatttacaaaggaaagaggtttaattgactcacagttattccgcagggctggggaggcctcaggaaacttacaatcgtggcggaaggcaaaggagaagcaagaaccttcttcagaaggtggcaggagagagagagagctcaggggaaactgccacttttaaagcatcagatctcatgagaactcactccctatcatgagaacagcgtggggaaaattgctcccatgatccagtcacctcccaccaggtccctccctcaacacgtgggggttacaaatcgagatgaggtttgggtggggacccagagccaaaccgtgtcacaggatttggacccaggaagtctgtgtctatctgcttgattgttgctttgaatctcagggctctgatgccaccctgtgtgggtttggccctgaactgaatctcttccaagagattagcatggtgcatgctaatgtaggccaactggctttatgtatcaagatgttgacttgagttcaaggtaaccaactctgatgaaaaggtcacaaagcgctcaaaggggctgggtgctgggtggggcagagaatgcagtccagtccccctgggtgtggcctgcaggccggcggaacagtgctcctcccctccttggcatcaccctcctttcccctgggtgccagtgcgtctttgattgaggtggtgccccttgtttcctggcagctctcatgctcagggcagctatgaaggagccagggtctgtgacgcttacagtggaaggaattttagagacccagttgcccaacttcaggaacactaacaatagccagctttatggcgtccttactgcctgccagacgtggtgctgagttctttgccactattctctgctccgagtcaactctgaggtgggcaccactctcccctcttagaggtgagagagagaggccgggaggttggggctgcaggctggtgaggggcagagccagccaggtctggtgccaaagctgtgccatccccaccaagccgtgtaaaaagggcacagtgcctgctccgttcccaggattgtggaacatgtggcagtggagggtgtgagcaagctgtggaaaccgctttggcagaagagtcaaagtctggtcatctccagtggtgtctccttcacaggtggcagattaaacctggagaggttaagaaggggaccaactcccctggtgaggggtagagcagggaccatccccaggcctagttcagcacatcttgtaggctgcctgtgtaatcttctgatcatgattttttttttcattttttttattattttttattttaattttaattttatttattttattctatttttttttttttgagatggagtcttgctccatctcctaggctggcatgcagtggcacgagctcagctcactgcaacctccgcctcctgggttcaagcaattctgtttcagcctcctgagtagctgggactacaggcccctgccaccattcctggctgatttttgtatttttagtagagacagggtttcaccttgttggtcaggctggtctcgaactcctgacctcaggtgatccacccacctcgccgccacaaagtgctgagattacaggtgtgagccactgcgcccggccctgatcaggattttttgctctaagaatatcaaggtgacctgaattgctttgatgtctattaaaagggtatctggctgatacgttgcttgtagtttacattgcagcctgggccggcctcactgtctttattttctggaagacttacatcagccagggttcatctgagccctcactcccatcagtgaagagggagcagctctatcaggcagcccctggcctgggccccaggaggctgctaaggggtgaggccttcccagggacatggagtccatggaggagccacggcttcaccaagggatgaattgaggggtggtcctggggctaaggccatgagggcctttctggatcccccatttgagagccttgctgccactgaggggctggtggccggggctcagagaaaggggaaaagatgttgccagactggacttcccaaagcccattgttggcattctccttggaaatcttgtggggtgaacagttgcacaattaaattggtagggcattgaaacacacgttgagttagatgatctaaactttaatatggaaaacttgaaaacactcgggctttatttgggggaagaaagcattaatcaggaatttttcatttgtgagtgacagaaactctcctcagactgccccaagtcagaaaaagaatttattactcatatacctgaaagtcttgtgctggtctactctgtgttatgaaggaataactgagactggataatttgcaaagaaaagaggtttattttggcccacagttgtgcaggctgtaccggaatcgtggtgctggcatctgctcctggtgaagcctcaggaagcatacagtcatggtggaaggtgaaagggcagcaggcatgtcacatggcaagagagcgagcaagagagtggggaggtgtcaggttctttttttttctttttgacatggagtctcactctgtcacccaggctggagtgtggtggtgcgatcttggctcactgcaacctctacctcacgggttcaagcaattctcctgattctcctgcctcagcctcccgagtagctgggactacaggcacctgccaccatgcctggctaattcttgtatttttagtaaagacggggtttcaccatattggccaggctggtattgaactcctgaccttgtgatccacccgcctcagcctctcaaagtgctgggattacaggcatgagcccctgtgcctagccggtgctgggttcttttaaacaaccagatctcatgtggactcatagagtgagaactcactcattactgagaggacagcacgaagccattgatgagcgatcccccccataacccaaacaccttcctctaggccccaccttcaacacggaggtcacatttcaacatgagattaggagaagacacacatccaaaccgtatcaaatccttagtttcaggtacagctggtccacatggcgggatggtctctctcttctggactcttcccaccacgtggctgggtggggcccgaacagctccaggcttagggccacccagtctcgtgcccgtggtcatcctctcggcctctccatctctgctgggtcatgttcctgcctctgagcccatcactggccagaggaatgtagggctctagagctttgggttggggtcccagcctcttatgagtcacatggactgagactggggtggtgggagttaccccaaatcaggcactgttctagggcagatgccaggcaggcctggaaaactgacttctgtgtgttaggtaatgccccatgccagatgaatcttttccctgcagggcagttggatttttctattttctttctgtaatagttctctgagttagaatcaggaaacttattttgtgccttgcctttggaattttgagctcttttcttccctacttcgtcctgccccctgttctccatcctgaaaagccagtgtaaacatgggcatcctgcctcagagtccggggcctgcctttttggtagggtattcacaagccacggggcctgcctttttggtagggtattcacaagccacgggcccagcttttcagggcatcgatcgcgagccgtttctgctcactgtcagcagtctgtcagccaggacagagtttattttgtctgtctatggctggcgtttccctaacccgattatggattgatgtggccatctcctaggaatttaggagctactcgtgctttcaggggagcaagcgatggatttcactgtacctctttctgctgtccaagtttgcatggggaaaatgaggaccctgccaggagcttgcctgacaggccctgccccgctgcagactcccagccctgctgggtaggatcgctgcaggcctcccgcctctgtgctccggtatagtctcggagatgcccgttgacgaagaagacatacagatggttgaatagaacccattcttttgtataagccaaaaacttaccatttttgaaaatcaccagtgcatgtctggaagacaaaccctcgtcatcctcgatgtgagtcttgctcagtagtctgcactgctccgattcggaggacaggtgtgaagttcctgtttgtgttcgtggacttgcgctcttctgacccttattctttaactaaagtgctcatttgatctctgcaaaccttgacccacctgtggtggccgttgccccagaattgctgagttgactgtcatcatcctgtggcttattggttctcattcacatgcaagggaagggactgtggctctttaatgcttaaagcacgttttgctgggatttgtccattgtcccaaggactctcaaatgtactgaacacctcccaacccagatctttggcccttctaggtgactgtcacagggaaggagcaacattaaagtaatcataaaataatataattgtatacttgtaatttccagagagacttgcaatttataaataaatatataatttaataaaataaacataagataataaaattaaaacaaagcaaacctccaagagtctaagactggggttttgcctttggccagtgcatggccagggaagctgctggcagctcgcctggcaggtgaagatgagatcgagacctctgagcatcctaagacgtgcagcaccatccctccctttcctcctgcattgcgggtggcagtgagcgggagctgtggggctgggcgtggggccatggatactgagaagagaggagacacaccctgcctgcagctggcaccaggctgtactggctcttgtctcctgtcaagagtagcggcagttgtgtggggctcgaggtactgatccatttgctgtatgatcacagggtcttgcctggagtgtgcgttttattgcactagcagcagaatggtaagggaaacatgctcggggacagggagggactgcacctgcgaatctcccggccctcaagattctgatgaggttagtgacaggtggaaccggcacagtggtttcaaacctccctggatgattgtcaggtaccaccagggtggagaatccccggtccagggcctcacagctcacagggcggcagcatgcgcattgtgaggcattgcaagtttgttgggaatgcagaatcttgggcccacccagacatactggaccgaagttggcctcgtaacaaaatcccaggtgattcgtgcgcacactgctgttggcagagtggcccaggcgcaggtaagtgctaggtcttctcacagcagcctggaagacaagatgaaggatgggttgatggaggagaggggaagcagtcacagtgggaggcggggcttgcaccaggacccacgcgccagtctgggctgcttgcagttgcatgcggcagtccccttagagctgccctgggcctgtccgaggtcacagaatcctgtggagccatatggagaggccacactttagagaaggtgatgacttggattggacagaatctgaagctctgaacacccgagatgagcaacacaactcattcctcttaagtcttgttttgcagagtcatgtcaaaatgaatactttatctagttttcccaacattttgttatgagaatttccaaagataagaaaagttggaagaataacgaatgctccatttgagttctccagtgaacatgcgactacatttgctttatctcatgactgtccaccccgtgtcatcatccatcttactttctgatgcattccaaagtaggtgccattatctctgaccatgaatgggtgacagggagtgacagctgccttctgtttagtacctaccatgtgctaagcgctttgtagactgtatctgcaatttttatagcttcaccaaagaagctttttttccatgtgatgacacccacgttcaaggaggttacttaaaacgttacacaactcgtaattggagagcctgagattttaacttcaggccttcacccaaggctgttccctccatgccctgttgaacgtggaattagaaaggagctggatgtactgggatgctgggcagatgatggtgtggacctagtccctgtcctcagtggtaggatgatgatgtgtcgggtgcagtgggagggaggctgatgaggcacgcagggagggcttcctgaagaggcaatgcttgattcttgtaggaagagaagctggaaatgactttttggaaagggttttccaggcagagggaatggccagggggaggccctgaggactgtgctagtgtggtatttatgacagtgcccgtctctgggcagctgggctttgggggcgtgtcatggagggccacgtgtgatggatgggtaagagccacacctgccctcagccttctctggagacaattgatatgcaggatacgatgctgggtgggggcctgcaaagacactgccagtgtgggcttcacgtcaaggaacatgggctgtagatgaggcagcatggatctggggagcctgctacacagcagggaacctgaagagctgcaaaagactccagcacgaggcttctggtgatggggagggagttgtgagaatcaggggaggcttctagagggattgaagattgatgaaggtcttgaaagacggggaagtgtgagcagacacagaggagagagggagagggactatagggggtagtgtggcaggagggacacagtatgttgaggtagaaagtcaagcatattccagtaatggaatgcacattcctagggggtagtgtcgatggttcactgccccctaacagggaaagctatccatgggtcactgccggatggagcacttcagactgaggtgatgagaagagatttgcaaagggatgtggggtttgggcctttgggtggtgggggaagtggggagatgggaattggactggcagaaaggaatcaggaaggagctccgggtgggcaagtttgaataagagaataagttgagggaggaacttgcaaggggagtgaggagaggtctgggaatgaggcagagtgcaggggccttgaacgctgggaagctgcagtggggctttctgtggcatgcaggggcagtcccagggccagcactgtggagggggtaggcagtgctggggaggcagctgcaggcagagtgcaggaggcctgcagtgctggggtggatggggtgtctgggtggctgcagggaggcttccagagtttcctgcagtcgctagcgcccaggcgtgcagacctgatggaggtggctgtggtaggagggaggagcctgaggagctgagaggtaaggaagtatgagagacacgtgccgctgtcactcgctgcaggctagcacagagtcggtaaagcaggtgcttgtgaataatcggatgataattgatgatgagatggtgaaaaccctagcaatgtccagaacctgcagcgccccaaaccctctcactgccgatgtgaagacctggtccagatcctacagagtgaggacgtgcagaagcacagatagaaaagaaacagcttccccatacacacactcagcatagagcccaatgatcagcaagaagctgttagaaaacagaacctttcagaaaagatactcaatattgaaacaacaaatgcaagaatacccaggggtagacagtgcagaaaccacagaacagaaggatgcagaaacagtgtgcgtgacatgaggcccatcctaggtttctggtctggaagacagacaacgcggtctctgtaagaatccagaaagaggcttttgtgttctatgttttggggatgaaagatatgataattgttctaaatttcacctgaaagaaaaaatggaaagctgggtcaaaatgatttttcagtagaaaaatcgaaggaggccttacctcggcagataggaaaatgcaatgcagagatttatttactgcctggggcctttcaggcaaaagtccttttaaaaggttaggttagaaacaacaacatcaaaaaatattgtgtgtgctgggaagggcatgggaagcttcctgtttcttctttctgatcccagttggcagaagcagcgtgttttaatggagaaaaatatgatgtctctggtctccatgtagactgctaatgtagcaacacagaggactcctaatgtttacatctcatcattctagtgatatttctgattgctccattattttttaggccacctgtaccttttcacgtgtctattcaaaggaaaacgtttcttaggggtttcctcaaggttttgcagaagtacattttgtttttttaagttagttcccacctttttttggaagacttataaaaatgtgtgaacactgagacttatctagttactagataaaatacttgaagtgaataaaaatcttgtagttgtaagaatagagttgggcatggtggctcacgcctgtaatcctagcactttgggaggctgaggcaggtggatcgtttgagcccaggagttggagaccagcctgggcaacatggtgaaaccccatctctacaaacgatacaaaaacaactatttgggtgtggtggcacgtgcctgtagtcccagctacttgggaggctgaggtgggaggatcacctaagcccaggaggcagagattgccgtgagctgagatggcaccactgcactccagcctgggcgacagagcaagatcctgtctctacataaataaataaatagaatatataattgaaaggatcgaccagtacctttggttgctggtcaaataaatgagttaacattcagttaactataaaatacagatggtccacagtcccttcccttgttgactcattttagttagctggaaatcagttttctttggaggatgtagaaggaggtggggacgacgtgatcgctgatgtttagtgagctcttactctgtgacagccatggttctgagaactttctgcttcttgattaattcctactgcaaacctgtgagttctctccatttcagaaatagggaaactgagtcacagtgggtttgagcggcctgccagggtcacagaactaggaagtggcaggtctcagatctgaatccagacatcctgactccagaactttgtcctgcgcttgcttcctctctgttttatgagtgatgtttgtctctgttgattatctggtttttttttttttcagtctctagtattgacctagagatggctctgggatgtggttgaatactgaccccagaagcgatgcccggaaatggcccagcactgccacgttacctcctgttatccttcctgtgaagccggtggtctcacctttcccgttcaggtggcgttgctggtcatgggaatggaactcccctctgccccctcccttctgttccctggtcttcccggtgactgaccagccacgggcccgcatctggggtgacccaggcagtgcgtccactctgtgtggagcttggcttcctctgtcgcagtgaggagtcgagggaggcggctctgcggctccttctccagctccggagcctccctttcttctctgcacttctccacctgctgtttgctaggaagcaccccgtgaatcacccacaggccccggccccggccccagcaggctcccgcacagacacggcttctgggaacatcctgacagtgcctcatttatggggctgcacagagcagtggccttgtgcccacggtgctgagtcacggcggattgttcagcaattccattaggataatctatcccagacagagagccttgccttggagcctgctcaggacgccgggtggcccattagggcctggcgcctggccagaggccacatgacagccggcttctgcactgtgggtttgtcctgggctccttaatgaggccagggacttgagttttcttgcacttttgcttattttcctgcataaggggccaccaacctgtggagctgtgtgaaatgcccacaatagcccatgactcaggggattggcatttctcacagtccccgaggcttgggggcagatttcctccaccgctctcaaaataaccaggtttgattgcagcctcagagaacatgctacccatttcttaaagtggtacgaacctattccttaaaaatgtcccttgcagagctttagaggaagtcgtggtttctggcttctcctcagagtcttgttgatgctttcgccgtgtagtcctggggctgtgcggaaggagggtggctgccattgggctggatgtgctacccaaagcatgaactcaatggccagtgcccagccgggtgctcacagatagtaaaggtgacatgtgtcgctgcctgctaggatccggccattgagaagggacacagatgagggatagctccttctccagcaggagcttcttacttataggagagctctgcagggccattttggatgaaatcaccaagagaatttattttcattaatatggcccggagggtctatctgtaggatttgtgctttctgaaatttgtgtgcaataccatggtctctggcctcactgggaggcctagtggtatcgcaggggagggggctgagagctcaggctgcctgggtttgcatttttctctttactggtgagccgtatgcccttgaccaagacgctgtctctgcaccccagtcttctcacctctagagcgaggatgcagccacaggccctgtgttgggggtggcttcgacggtgtaagtacatgagtgaccacaatgcctggtgctcagtgtcagccagggatggtaaaggcctagaaaggggaagctgtggggctgtatcttgtcccctgaacccagccagaagccccacgcagggctggtgcctgtttcgtgtgggtcctgaactctatgaaggtttggtgatgctttggaattctggaagaggagcagatgcattccctttggagggtggggaagacgtatttttccctggacagcaacataccttccgttctaacttgggcagctcaagggagaggccccgtggtacccgaggttcacagctgagccaggccgggaggatctgaactagaacctagtctttctccccacgccctgccctggctcctcagctgcaggacgccaccccttctgctgccgtcatcctggggtgcagagccttggggcctggcttttaccccgaatgttcctctgattatatagacctcagaactttctcagcagtgaaagctgtttgcgttcctggaacctacaatgcttggtcatgagggcgtgggattaatgggttggtgtcctgtttcctggcctctgccctgagcgaagggctggggctctggactcgggcctctgcacatgccccgtccacacacaagcatcccgcagtcactgcgccggggcaggcccgctgtgtgcgccttcgcgagagtgcctcatgcctcctttgctttcttccagctgctcacagggctctcgtgttcatggggctcaccatgtttcaacagatggaaatacaactcagtgcagtttgtccaagctgccaagtccctgctcgggtgtgggcaccctgctccgtttttgtgcccagctctcagccataagattggcatttctcagtgggctcttgttctggatgccttttgccgtgtgcagtgtatttcttggaaccggagttagtgacttcacatgttgctctagcaactgagaaactgttgcacccagagctgccagcagcccaaggggtcttcgcgagtgactggctgacaggcatcccggtgctaagcccctcgccagcaggctgggtctgctgggaccactctcctcagctctgggatctgaagcagtagacgtgaacaacctaatgaaacttctataattttagaactttggcgcagacatagtcaaagaaatcaccttgttgggtacttctcaccattttattaaaggagataacaggatgccaatttggatgaagtgaggcccctgggggtggcatggggaggggctactgacggggggcgctttagcactaccttttccgtctgcctgccttctacttctttttgtcgtctccaaggtgaccccctggaatgcagtttgaaaccacagatgcagtctggctgccttataagtgtcagtccctgccgtctcctggtcagccctctgcaagctgcccccaccagctgtgactccaggaagaacccagtggggggtgtagctgctctggggccctctagcctggggcccacatctctccagtgcccccttgctcctgctcctcttcaccctggactgagaaagctttctagaagggcttggctcgccagtactgccgaagccctggcctggtcattttgttcactgggctagtaggggttgagcgccatgctggctgccagggatgtggcggtgagcagagcaggtggcctggcccaggtctgctgaggctggtgggtgggcttgccagccctatggtgcagccctgcccaagtctcctcttcaggtagaagtcctaaaacaggtgacactatggtcattggccgcataccacgatacgttttattagaggcacttcttactctttcgtttcctaatgaattatgtttgtaaattatttttacagggccttattggaaggagaaagtaatccagagatagtgatctgggctgagcacgttgaaaacatgccgtcaggtaagtaaaagctaatgacttgacttagctttaggcatctgaactgtttattctgtggctagatagtaaagcaccatcatcgggaagaacgggttagatatggtgtttagataacaggagttcatctctcatttaagtaccaaatagattttagtttagtgtgacataatttcaattatgtgaatgagaatgtttgggaaggtgcttgataaacttggtccctctctcgacaggatgcaggagcggaaggggctaatggcactgggcagtgtgagggcgagcaggagtgcacctgaacttgtgtttcacacccctggaagggacactccttccatttccagaccaaggggttatggttgttacacctgtagagggaggtatggccttggatggcaggcaggcagcactctggaacctgctaccctaacaggaagagagatgggaatagttacattgtttacaccaccctaggttgttgtgagcagctcaggaaaatgtgtcctggtgccttgaagactaccttattgaggccaagagcctcaggacagggcccatccttcctatggctgcagaactgacataagatcattaatgttcattagaaagatcctaagaaactgagggataacttgttttttaaccttttaaagccctatagaatcttgaagagctctggctaagcaagtgtcgattaaattacgtatagaatgttgagttcacaccttaggcagcagcatggttttagtcttcattgtttcttttaggcaactcatggatttgacatgtcactgggttgagaagaatatttgggttctagtcatctataactggaagggatctggtcttagacaacatgcagcaaattttctttctaattttgagagtaagtttgaaaaaagcaaaggtgttcatggaagggtaggcattggtcaacctgcctggcatcagttaacgtgtgacatctataaaacaagaattaactccccagatttcaaggtttacttagttacctacatttttaacctgtggatacctaagtttggacatccatcatgtaacctagagagaggggagaaggaagaaaagggcccaggagctccgaggaagaccaacagtctaagccagggccttgctcaaattttcccagttgtgattttggggccgagggagagcacacagaggggctaacagctgttgctgttaacttgcttcattcattcattcattcattcattcattcattatttttcaagcttcttgaaggaaatagagacttaatatttgtaaactaaatttattctggcaattacatattatgccaaaagctttagaataaaaattactagttgggaatttttattagacgttgagcttctagatagttctgttctgttgagtaaatatacagataagttcctaagtagtgaacttatcaatacttgttagtgtgcttgtgtttcttttataatattgcataaaataatgttggccgcttgcccgctagccggtggacctaaacccagtctgtaatcttccatgtttcttgttgaatcttaactgtaaatgagatggtccctgcactattgcctgggggttcatcttctgggacttctcagttggatcagtaggatcagttgacctgaaaagaggagtcttgtagaaaatgtcctggcctggtctctttcctgtatcttgggatctgtgcaaaggaggcctctggccttggctccataagggagagagaaagccctgtccccgctgagccagctggggtgtgggtagacaccaggggcactctcggggtggacggtgctcctggctgcgttctaaccaccagctgccattcctaaagagcggtttcccctgctggggtgtggacaccccaaagggtagcactgtctgcaaacagcctggagcaaagctggaagccctgaggactgcctcccaacttcaggatcatgacactaagacagaccggggtgtttctgcactggctccttttcagataagtgttaaatgtaaaataaaagatcagaaagcttaaagaagttaaattctttaatacttgttggcccaatatggaaatcagtgaaacagaagagtatattaaatagtggaggataatgctatttggtgtttaataatgacacactttgtaattacagagctcttctctgctacagtaaattaaacttacctcaaaaagcagaaattaatgatttcaaaatataagattgtgaaatttcagccacaaaaacgagcacctctgacctctctgggatatgcattgtgctttatgattaatgttaagatgagtgagtattttaatatcagtaactggagaaacgtgttaggctgaagtatttgtagtgctacattttattgtaacaggattttgtaaactgccaaaaaataatttgggcaccaaatataacttatctttataatgagctttctgtggtaacagtgtatatttattatgatggaatgggatttggcctgcaacaatgcttgtagatggaaaagggtaatgatgactgtcattttaatgaatgctttgttcaatttctacagaattcagaaacaaatcctatcactataccgactcactactacagagggaaaatgaaaggaatctattttcaaggcagaaagcacctttggcaagtttcaatcacagctcggcactgtattctaacctgtcagggcaccgtggatctcagacgggcacatctattggaggtgatgccagaagaggcttcttgggctcgggatattcttcctcggccactacccagcaggaaaactcatacggaaaagccgtcagcagtcaaaccaacgtcagaactttctctccaacctatggccttttaagaaatactgaggctcaagtgaaaacattccctgacagaccaaaagccggagatacaagggaggtccccgtttacataggtgaagattccacaattgcccgcgagtcgtaccgggatcgccgagacaaggtggcagcaggtgcttcggaaagcacacggtcaaatgagaggaccgtcattctgggaaagaaaacagaagtgaaagccacgagggagcaagaaagaaacagaccagaaaccatccgaacaaagccagaagagaaaatgttcgattctaaagagaaggcttccgaggagagaaacctaagatgggaagaattgacaaagttagataaggaagcgagacagagagaaagccagcagatgaaggagaaggctaaggagaaggactcaccgaaggagaagagcgtgcgagagagagaggtgccgattagtctagaagtatcccaggacagaagagcagaggtgtccccgaaaggtttgcagacgcctgtgaaggatgctggtggtgggaccggtagagaggcagaagcaagagagctacggttcaggttgggcaccagtgatgccactggttctctgcaaggcgattccatgacagaaaccgtagcagaaaacatcgttaccagtatcctgaagcagttcactcagtctccagagacagaagcatctgctgattcttttccagacacaaaagtcacttacgtggacaggaaagagcttcctggggaaaggaaaacaaagactgaaatagttgtggagtctaaactgactgaggatgttgatgtttccgatgaagctggcctggactaccttttaagcaaggatattaaggaagtggggctgaaaggcaagtcagccgagcagatgataggagacatcatcaacctcggcctgaaagggagggaggggagagcaaaggtcgtcaacgtggagatcgtggaggagcccgtgagttatgtcagcggggagaagccggaggagttttccgtcccattcaaagtggaggaggtcgaagatgtgtcgccaggcccctgggggttggttaaggaggaggaaggttatggagaaagcgatgtcacattctcagttaatcagcatcgaaggaccaagcagcctcaggagaacacgactcacgtggaagaagtgacagaggcaggtgattcagagggcgagcagagttattttgtgtccactccagatgaacaccccggggggcacgacagagatgacggctcggtgtacgggcagatccacatcgaggaggaatccaccatcaggtactcttggcaggatgaaatcgtgcaggggactcgaaggaggacacagaaggacggtgcagtgggcgagaaggttgtgaagcccttggatgtcccagcgccctctctggagggggacctgggttccactcactggaaagaacaagctagaagcggtgaatttcatgccgaacccacagtcattgaaaaagaaattaaaataccccacgaattccacacctccatgaagggcatctcctccaaggagccccggcagcagctggtggaggtcatcgggcagctggaggaaacccttcccgagcgcatgagggaggagctgtccgccctcaccagagaggggcagggtgggccggggagcgtttccgtggatgtcaagaaggtccagggtgctggtggcagttccgtgaccctggttgctgaagtcaacgtctcacaaactgtggatgccgatcggttagacctggaggagctgagcaaagatgaggccagtgagatggagaaggctgtggagtcggtggttcgggagagcctgagcaggcaacgcagcccagcgcctggcagcccagatgaggaaggtggagcggaggccccggctgctggcattcgctttaggcgttgggccacccgggagctgtacatcccttcaggcgagagcgaggttgctggtggggcctctcacagctcgggacagcgcactccccagggcccagtgtcggccactgtggaggtcagcagccccacaggctttgcccagtcacaggtgctggaggatgtgagccaggctgcaaggcacataaaactcggcccctctgaagtctggaggactgagcgaatgtcatatgaaggacccactgcagaagtggtggaggtaagtgcgggaggtgacctaagtcaggcagcgagcccgaccggagccagccggtctgtgaggcatgtcacgctgggtcccggtcaaagtccactgtccagagaagtcatcttcctaggccctgcccctgcctgtccagaggcatggggctcgccagaacctggcccagcagagtcttctgcagatatggacggatcagggaggcacagcacatttggctgcagacaatttcatgctgaaaaggagattatttttcagggccccatttctgctgcagggaaggttggtgattattttgcaacagaagagtcagtgggtacccagacttctgtcaggcaactccagttaggccctaaagaagggttcagtgggcaaatccagttcacagctccactttcagacaaggtggagttgggtgtcataggagattctgtacacatggaagggttgccagggagcagcacatccatcaggcacatcagcattgggcctcagaggcatcagaccacccagcagatagtttaccatgggctggttccccaactgggggaatctggtgactcagagagcactgtgcacggagagggctcagcagatgtgcaccaggccactcacagtcatacctcgggtagacaaaccgttatgactgaaaagagcaccttccaaagtgtcgtttctgaatctccccaggaggatagtgcagaggacacatcaggggcagaaatgacatcgggtgttagcagatcctttaggcacattcgactaggtcctacagaaacggaaacctctgaacacattgccatccgtggacccgtgtccagaacatttgtgcttgctggttcagcggactcccctgagctaggcaagttagcagacagcagcagaacgctaaggcacattgcaccagggcccaaagaaacttcgtttacctttcagatggatgtgagtaacgtagaggcgatccgcagccggacacaggaagcgggagctctcggtgtgtctgaccgtggttcctggagagacgcggacagtaggaatgaccaggcagttggtgtgagctttaaggcctctgctggggaaggagaccaggcccacagagaacagggcaaggagcaggccatgtttgataagaaggtgcagctccagagaatggtagaccaaaggtcggtgatttcagatgaaaagaaagttgccctcctctatctagacaatgaggaggaggagaatgatgggcattggttttaataagcagaaacattttgttttaatggcagcctgttggcgacgtgccaacatccaaaggccttaacttattttaagaggccgagggagtctatgaaaatctccccttttttacttttttaaagagtactcccggcatggtcaatttcctttatagttaatccgtaaaggtttccagttaattcatgccttaaaaggcactgcaattttatttttgagttgggacttttacaaaacacttttttccctggagtcttctctccacttctggagatgaatttctatgttttgcacctggtcacagacatggcttgcatctgtttgaaactacaattaattatagatgtcaaaacattaaccagattaaagtaatatatttaagagtaaattttgcttgcatgtgctaatatgaaataacagactaacattttaggggaaaaataaatacaatttagactctaaaaagtcttttcaaaaagaaatgggaaataggcagactgtttatgttaaaaaaattcttgctaaatgatttcatctttaggaaaaaattacttgccatatagagctaaattcatcttaagacttgaatgaattgctttctatgtacagaactttaaacaatatagtatttatggcgaggacagctgtagtctgttgtgatatttcacattctatttgcacaggttccctggcactggtagggtagatgattattgggaatcgcttacagtaccatttcattttttggcactaggtcattaagtagcacacagtctgaatgcccttttctggagtggccagttcctatcagactgtgcagacttgcgcttctctgcaccttatcccttagcacccaaacatttaatttcactggtgggaggtagaccttgaagacaatgaagagaatgccgatactcagactgcagctggaccggcaagctggctgtgtacaggaaaattggaagcacacagtggactgtgcctcttaaagatgcctttcccaaccctccattcatgggatgcaggtctttctgagctcaagggtgaaagatgaatacaataacaaccatgaacccacctcacggaagctttttttgcactttgaacagaagtcattgcagttggggtgttttgtccagggaaacagtttattaaatagaaggatgttttggggaaggaactggatatctctcctgcagcccagcaccgagatacccaggacgggcctggggggcgagaaaggcccccatgctcatgggccgcggagtgtggacctgtagataggcaccaccgagtttaagatactgggatgagcatgcttcattggattcattttattttacacgtcagtattgttttaaagtttctgtctgtaaagtgtagcatcatatataaaaagagtttcgctagcagcgcattttttttagttcaggctagcttctttcacataatgctgtctcagctgtatttccagtaacacagcatcatcgcactgactgtggcgcactggggaataacagtctgagctagcaccaccctcagccaggctacaacgacagcactggagggtcttccctctcagattcacctggaggccctcagacccccagggtgcacgtctccccaggtcctgggagtggctaccgcaggtagtttctggagagcacgttttcttcattgataagtggaggagaaatgcagcacagctttcaagatactattttaaaaacaccatgaatcagatagggaaagaaagttgattggaatagcaagtttaaacctttgttgtccatctgccaaatgaactagtgattgtcagactggtatggaggtgactgctttgtaaggttttgtcgtttctaatacagacagagatgtgctgattttgttttagctgtaacaggtaatggtttttggatagatgattgactggtgagaatttggtcaaggtgacagcctcctgtctgatgacaggacagactggtggtgaggagtctaagtgggctcagtttgatgtcagtgtctgggctcatgacttgtaaatggaagctgatgtgaacaggtaattaatattatgacccacttctatttactttgggaaatatcttggatcttaattatcatctgcaagtttcaagaagtattctgccaaaagtatttacaagtatggactcatgagctattgttggttgctaaatgtgaatcacgcgggagtgagtgtgcccttcacactgtgacattgtgacattgtgacaagctccatgtcctttaaaatcagtcactctgcacacaagagaaatcaacttcgtggttggatggggccggaacacaaccagtctttttgtatttattgttactgagacaaaacagtactcactgagtgtttttcagtttcctactggtggttttgatattgtttgtttaagatgtatatttagaatgacatcatctaagaagctgattttgctaaactcctgttccctacaatgggaaatgtcacaagaatgtgcaaaaataaaaatctgaggaaaaaaccca

SEQ ID NO: 122 - DNA, 4051 bp, Homo sapiens
tctggaagccaggcgggcagggcagagaccccggctcctgcgcccctcctagctcccagagagcgtggatcgcgggcggggctcaccgagcgaggttacctctcttgaaaatacttaaacactttttttcctctccactgaaatctcaaaaaacagcccattttgaaccagaataatttagtctgacaacagattcttcctctgttcacagctgtcccagagggaggagctgaaatctgaacctctcagctgtgattggatctttcttgcaaaagagaggaaaaaaaaaccctcccagccaaaacgggctcagttcgtaaaggagccgggtgacttcagaggcgccggcccgtccgtctgccgcacctgagcacggcccctgcccgagcctggcccgccgcgatgctgtagggaccgccgtgtcctcccgccggaccgttatccgcgccgggcgcccgccagacccgctggcaagatgccgcgctccttcctggtcaagaagcatttcaacgcctccaaaaagccaaactacagcgaactggacacacatacaggtaaaaagagaaaaatatatctagaactacgtatctagagctttgcaaatatgaatctacgtattacccttcaaataccattacaaaagagccaaagattcaactgttttcctttttaacagtgtcctgaaagggagcttacattcttttgatcatttagggttcgttttaattcaaaacttttaaaattcttgactaacaaggaacatttcattcaaatctcgcagcttcgtttgctaaagcctgtgtatacatgcataatgagtatgtgaaagatgagcaacataaggattgaattactgcgtttttcatgcactaagtctcctttcctttagaaggcggcttgatgcaggcatatctttgtactcacggtcgtaatacacctaaatagcccatacgtaacatggaaaacaacttttctgtatgtttaaaaataatgttgaggctctccttcctcaatggggacggcgaaggcactggcttggctgcactgtctgacttcagagcacctatagctccgtgcagctgtcagcctatgtgtgcattaagtacagtaactccgtaggtgccagggtggaaatgaaacattttaccagtgtgtatgccctcctaaatgggtctatcttcttcctaagaaaatcacgtgtgtgttgctaaatatctttccagtgtgtgtatacttgcgtgtggatttatttttaattatttttgccttaatcttctctccctcccttttctttcccagtgattatttccccgtatctctatgagagttactccatgcctgtcataccacaaccagagatcctcagctcaggagcatacagccccatcactgtgtggactaccgctgctccattccacgcccagctacccaatggcctctctcctctttccggatactcctcatctttggggcgagtgagtccccctcctccatctgacacctcctccaaggaccacagtggctcagaaagccccattagtgatgaagaggaaagactacagtccaagctttcagacccccatgccattgaagctgaaaagtttcagtgcaatttatgcaataagacctattcaactttttctgggctggccaaacataagcagctgcactgcgatgcccagtctagaaaatctttcagctgtaaatactgtgacaaggaatatgtgagcctgggcgccctgaagatgcatattcggacccacacattaccttgtgtttgcaagatctgcggcaaggcgttttccagaccctggttgcttcaaggacacattagaactcacacgggtaagagaaaaaccataggcaggaatgttactctgagatacaatgaagccctgggctggctgttggatttgcatgaagttgtgacatagtgcttttaatgatggacagtcattgatagctacttcctgactactcaaaaagttgttagggcacaaagtgctccatttcttgctaacaacctctgctccagggactgcaaacagcatgtagactttggaaagtagattcagaaggtttggtctcaaagatcagttagaaaatcaggaaagatgtgcttgaatgtgtgttctgtgaaactgcccccagtaatcagcaaatacaaatgttgctatcttaatcaattgatttggttaatagatgaaggcttttcctacagttttctgttagttacattcttgctctgatatttgtcacccgtgggtgacttggatagttgaaactaaatttactttgcctctcttgctttgtttggggattttttgctccttaatttcttattcgtatcacagaattattctgcagggtatcatggcacttagaccaccttaatcatagtacagaaagagggaaaaggggaaatattgggaaatgttgggaggtgctcaacattagctgcatctgctaaagcagaaagctttaagaagtgaaagtccaagaactacgtaaattatttctgtatgattggcagcagtaataatattcgtgtatgatttttaaatgcaatattcaagtttatcttaaaaattcaggtatttttaaaagtgtctattatgagggattttaatcaggttttgctgcttctcattatttaagcaaaatgtgattgacttttgttaacatgattttactttatgtttcctctaaaaacactgactgtctttctttttttctcccactccacccccaggggagaagcctttttcttgccctcactgcaacagagcatttgcagacaggtcaaatctgagggctcatctgcagacccattctgatgtaaagaaataccagtgcaaaaactgctccaaaaccttctccagaatgtctctcctgcacaaacatgaggaatctggctgctgtgtagcacactgagtgacgcaatcaatgtttactcgaacagaatgcatttcttcactccgaagccaaatgacaaataaagtccaaaggcattttctcctgtgctgaccaaccaaataatatgtatagacacacacacatatgcacacacacacacacacacccacagagagagagctgcaagagcatggaattcatgtgtttaaagataatcctttccatgtgaagtttaaaattactatatatttgctgatggctagattgagagaataaaagacagtaacctttctcttcaaagataaaatgaaaagcacattgcatcttttcttcctaaaaaaatgcaaagatttacattgctgccaaatcatttcaactgaaaagaacagtattgctttgtaatagagtctgtaataggatttcccataggaagagatctgccagacgcgaactcaggtgccttaaaaagtattccaagtttactccattacatgtcggttgtctggttgccattgttgaactaaagcctttttttgattacctgtagtgctttaaagtatatttttaaaagggaggaaaaaaataacaagaacaaaacacaggagaatgtattaaaagtatttttgttttgttttgtttttgccaattaacagtatgtgccttgggggaggagggaaagattagctttgaacattcctggcgcatgctccattgtcttactattttaaaacattttaataatttttgaaaattaattaaagatgggaataagtgcaaaagaggattcttacaaattcattaatgtacttaaactatttcaaatgcataccacaaatgcaataatacaataccccttccaagtgcctttttaaattgtatagttgatgagtcaatgtaaatttgtgtttatttttatatgattgaatgagttctgtatgaaactgagatgttgtctatagctatgtctataaacaacctgaagacttgtgaaatcaatgtttcttttttaaaaaacaattttcaagttttttttacaataaacagttttgatttaaaatctcgtttgtatactattttcagagactttacttgcttcatgattagtaccaaaccactgtacaaagaattgtttgtt

SEQ ID NO: 123 - DNA, 8363 bp, Homo sapiens
gtctcccctcgccgcatccactctccggccggccgcctgcccgccgcctcctccgtgcgcccgccagcctcgcccgcgccgtcaccatgagccaggcctactcgtccagccagcgcgtgtcctcctaccgccgcaccttcggcggggccccgggcttcccactcggctccccgctgagttcgcccgtgttcccgcgggcgggtttcggctctaagggctcctccagctcggtgacgtcccgcgtgtaccaggtgtcgcgcacgtcgggcggggccgggggcctggggtcgctgcgggccagccggctggggaccacccgcacgccctcctcctacggcgcaggcgagctgctggacttctcactggccgacgcggtgaaccaggagtttctgaccacgcgcaccaacgagaaggtggagctgcaggagctcaatgaccgcttcgccaactacatcgagaaggtgcgcttcctggagcagcagaacgcggcgctcgccgccgaagtgaaccggctcaagggccgcgagccgacgcgagtggccgagctctacgaggaggagctgcgggagctgcggcgccaggtggaggtgctcactaaccagcgcgcgcgcgtcgacgtcgagcgcgacaacctgctcgacgacctgcagcggctcaaggccaagtgagggcccggcaccccagactcctctttctgcgggcagggcacaggaggctaggcctggggtctggggtcccgctgtcagcacctgccttctcccggggcccgggaccctctcctgccccatgtggagaaagggtcctccacctgtgtgtttcaaggggccgtgacctccaggtctctccccctgcgatcccatcttgcacaggagttttcttggggacatagatcagggggtggatatgggagaatttaggggacccggtgccctgtggacagccccgttaaaaagcattttaagatgctggggcgatatttatggggtcaggtagttgatgggcagaggaagggctgcaggaggcccagagggcagtgtagccagagggagaagggaggctgataggagacagggaaagcagggcaagggcccagagtccaagcaacagctctcagctcagctgtgatgaggccctgggggaggtggggggaggggggagcttggccctggggccttgccgagactgtgtctttttacaaggtgaatggacaggctggagaaaaagggagtaggtgggggtcacagctctcagagagcttgggaggacctgactgtagacttcaccaggctccaagaacgaaaagggcagcaagtgtagcatatttgttggtcccacttctgacaggccaagtgagcacagtcaccctcctgccaccaaagtcataaatattaattgagcagctatattggccaggctggagctgggaaccagaaacacagaggtggataaaatagacacagtttctaaccccagggaggtcacacagtctggtggggacatagacttcaagggtgtggctcctgggcagagattgggccacttcctgtgccctccctgggtgggtggggcctctccactccctgtctctcctgcctctacccagcagccaggccctcccgctctgtcctggacccaccccctggtcagcccccggccagtcgtttccactgccagctttatcacccgcaactgtctgtctttctgtctgtcccacccaggctgcaggaggagattcagttgaaggaagaagcagagaacaatttggctgccttccgagcggtgagtgcccttcttttccccttgcatggcctctggccttgctctgccccacctgggtggcggtgaccatgtccttctcgcttggcctctcccaggacgtggatgcagctactctagctcgcattgacctggagcgcagaattgaatctctcaacgaggagatcgcgttccttaagaaagtgcatgaagaggtataccttggcccctcttcctggggtcactgggccatggggaaagcagccggaaagtggggttggggtgaggctctggctgggaataggggtgtgagggtgctgtgtgggccctgagaggggactgaagcccagtcatgccctacaggagatccgtgagttgcaggctcagcttcaggaacagcaggtccaggtggagatggacatgtctaagccagacctcactgccgccctcagggacatccgggctcagtatgagaccatcgcggctaagaacatttctgaagctgaggagtggtacaagtcgaaggtgggtggcctcgcccggggactggcatctccgtccccctgaatcccagcttggatgtgctgcctgtggtaccatccatgggaggagagcccagaggcttcatgctcccttgctcatccctacccgtgccctgcatccttctcatttttgggcccctttctctgcccttaggtgtcagacctgacccaggcagccaacaagaacaacgacgccctgcgccaggccaagcaggagatgatggaataccgacaccagatccagtcctacacctgcgagattgacgccctgaagggcactgtgagtccctgcccacctggccaggccctgccccttcctgtctgcagttcacaccctcactttgtgaccttgggcccatcatagatcctctctgggccttcatctacttaaatctacaataggggtaaaaccagacaagtggattccagttggatgctaaggaatcaggggttcctgggcatctacctatgtggggactgtgaggctgaatgcaatgttcctttgtatctattttattctgagtgttcacatatagacttaatttgagttcagggttcaacatggcctggacctgaccatctggagttgcctgccagccccaaagctttctttgggctgctagtgtcctcttcccttccttgacctgggttccccctctcctgcagaacgattccctgatgaggcagatgcgggaattggaggaccgatttgccagtgaggccagtggctaccaggacaacattgcgcgcctggaggaggaaatccggcacctcaaggatgagatggcccgccatctgcgcgagtaccaggacctgctcaacgtgaagatggccctggatgtggagattgccacctaccggaagctgctggagggagaggagagccggtgaggggccaggcaggagcccgagtgggaggtgcggggtgctgggtggtccatttctgtccccaggaggctcgagattactgattacctcaacaagacctggaaacaattttttttttttttgagatggagtttcgctcttgtcgcccagtctggagtgcaatggcaccatcttggctcactgcaacctccgcctcctgggttcaagcaattctcctgcctcagcttcccgagcagctgggattacaggcgcctaccaccacgcctggctaatttttgtatttttagtagagacggggtttcactatgttgggcagctggtctcgaactcctgacctcaggtgatctgcctacctcagcctcccaaagtactgggattacaggcgtgagccaccgcacccggcgtggaaacaattttatacaagaggccactgctctattaattgcagagaattaaccaaggccacctgggtaaaaagcaatttaattaacagcatttataaaaagagaaatataagtattcccttatccaccttcagaattaagaaccagcagcaaaaaaaaccatattcagcaaccaataataaaatattactgccagtcaagggagagatgaaagcagaatggggagtgatgaggagggaaacggagggagcagatagaggcaaatagagagagggagggagagaagccttgcacagggataggctaagagaaggtaaagagatgcatacagaaggcatgagtttgcacacacatgcacacatgtcagcatatgcacatgttcggaggaaaagacacagacgtcatgctcagagcaacccacctctagacacagaaaacaacatacaactggaaagggacaccagggaaccttgtgggataacagaaatgttctatatctttttttttttttttttttgagacagagtcttgctctgtcacccaggctggagtgcagtggtgtgatctcagctcactgcaacctctgcctcccaggctcaagcggttctcctgtctcagcctccctagtagctgggattacaggcgtgtgccaacacactcagctgattttttgtatttttagtagagatgaggtttcaccatgttggtcaggctggactctaactcctgacctcaagtaattcgcctgcctcagcctcccaaagtgctgggattataggcatgagccactgtgcctggcctagaaatgttctatatcttgatttggactggtagttacacagacgtggacattgatcaaaactcattgaattgtacattaaagatctgtgcatttcactgtatgtaaatttaacctcaatttaaaacagatcagttactccaaaaactggtaccccttgatactcataaaaataatatctgaaatttttaaaaaggagcagacatgtttagatacaggtacaaacataaagagaaacttcagattttgtaaaatcacgtctacatatgatggcctttgaaggtagctaaaggcatgttgcattttcccagcattaggcctaaatagtaagctctcagaactggcctggctggagggtgggcatgagcaatggatatcacccacagctgctactagtaccaacttcagtgccaggagcaagaaggaaatcctggtgctctggagggcgcggtggggttgcacatcctagtgtcgtgccagcagttcacagttgaaataatgatccttccagaagagactattcctgggacagctctagctggccttcgaccccattccttgagcagtatgggtggtgggagtgctggggtccgtgggactgggacagctgaggatggtgtttagaaaggaccagggtgagccttgatgggcggtctcagggaaagatgggagggttcttttttttttttttttgagacagggtcttgttctgtcccccaggctggagtgcagtggtgcaatctccgctcactgcaagctccacctcctgggttcgcaccattctcctgcctcaccctcctgagtatctggaactacaggtgcccgccaccatgcccggctaattttttgtatttttagtagagacggggtttcactgtgttagccaggatggtctcgatctcctgacctggtgatccgcccgcctcggcctttcaaagtgctgggattacagctgggcccggccgatgggagggttcttaactcttaggaggttttgtctcttcccttttaggatcaatctccccatccagacctactctgccctcaacttccgaggtgagtgtctgctggcaggcggaggctggagttgcaggggccaggagtccagcatgggcactgcccaaggccagccaggagggaggatgggaccctggggctagggacagacctggagtctggggaagaaaaaggggaccactgcgggtaggtgggggagtttaggtagaggtggatgaggcaacttatgacagagagagctttttatgtgattatattgtattgtatttaccatgtcccctgcaccttcttggagtattgggcctcaggaagcagcctctgttctgaatcccaaactctgaaagcaggagtgtccttggggacctggcttcaggagcatctcataccacctgccctctaagacacccacagcccattgtctgtttggcacattgccaagccccaccttggctgcttgtcgaacacctccagtttgctggagcaagatgttggatgcacgtttggaaaaaaatgccaaatcttagcaaagccaaacaatgaaaagaacgagctcttagggcactctgccattttgacattagtaatacgcagatcgggtggctttccaaccccagagagcagagaaacacacgataatgatgcattaggaaagcaagtcggagtccttggcagcttctcctttcctagatcaaaccttttctatcttcgatgtacatttccatcaggaaaaaaaacacgctgcgctccagcgagtcacaacattcatcacaggctggttgctagctaaggaaattcgtaagcaccaaactcataataccaaggacctccatttgacctttcctacacaactcagagcctctcttttcagttagttgtttatacagacaccaagtatgagtcttgcatttaaaacttcatagtacaaaaaactccacccacattgcacagtgcttttccaaatcaatagctttgtggccatgataaggttggtaccacttcactccgtgtcctcagtgaggaaactgaggcacagaatggcaagtgactgagcatcagcacaatgagtcagtgccttattcctgctctgtctcactttaagacatcaagttgctcatctgaattttttttttcttttgaaacggagtctcgctctgtcgcccaggctggagtgcagtggtgcaatctcggctcaccgcaacctccgcctcccaggttcaagcaattctcctgcctcagcctcctgagtagctgggattacaggcatgtgccaccacgcccccctaatttttgtatttttagtagagacggggtttcaccatgttggtcagggtggtctggaactcctggcctcatgatccacctgcctcggtctcccaaactactgggattacagatgtgagccaccgcacctggccctgaaatcttaaagggagataggtactgtaaggtcctctaaagagtgtcttgagactgggctttggggttctatcttgaagaaggggagtcccaggagacaaatgtgtgcagggctctcctggggcctgggggtggagaggaactaggagggatggggaatgtcagtgctgtgcagcctgggcctcaggtgtcccctaccctcctgcaccatcctgcacatggagcaaatctgttggctcctgagaccatctaaactatgggacaggcgctggggactgcagaaccacctgctgggtgctgggctgaaggaaaggtgttaaagtcttgaagaagtaacaagcctgtcttgaggggggttggggtctgctagggctctgcccaatgtggccccagatggactcccagcccctggtatagcccagcctggacttggtcaggctgagtgtgcgatggaccctgttacagaaaccagccctgagcaaaggggttctgaggtccataccaagaagacggtgatgatcaagaccatcgagacacgggatggggaggtaagtggtctgtctgggctccttacccttggtgggggctatggatgtgtctggggggactgtcttccacccagctgtgctggtctaggtccctggctagtggggcaagagagatcctgcggccctggggtggggatggctcagggctgaggctccattctctggctagcacatggttggactgggcttctcttcctccccaggtcgtcagtgaggccacacagcagcagcatgaagtgctctaaagacagagaccctctgccaccagagaccgtcctcacccctgtcctcactgctccctgaagccagccttcttccatcccaggacaccacacccagcctcagtcctcccctcacagcctctgacccctcctcactggccatccctcgtggtccccaacagcgacatagcccatccctgcctggtcacagggcatgccccggccacctctgcggaccccagctgtgagccttggctgttggcagtgagtgagcctggctcttgtgctggatggagcccaggcgggagcggtggccctgtccctcccacctctgtgacctcaggcactagcctttggctctggagacagccccagagcagggtgttgggatactgcagggccaggactgagccccgcagacctccccagcccctagcccaggagagagaaagccaggcaggtagccagggggactagcccctgtggagactggggggcttgaaattgtccccgtggtctcttactttcctttccccagcccagggtggacttagaaagcaggggctacaagagggaatccccgaaggtgctggaggtgggagcaggagattgagaaggagagaaagtgggtgagatgctggagaagagaggagaggagagaggcagagagcggtctcaggctggtgggaggggcgcccacctccccacgccctcccctcccctgctgcaggggctctggagagaaacaataaagagattcacacacaagccaa

SEQ ID NO: 124 - DNA, 84779 bp, Homo sapiens
gaaggcaaatgttcccccagctgtttcctgtctacagtgtctgtgttttgtagataaatgtgaggattttctctaaatccctcttctgtttgctaaatctcactgtcactgctaaattcagagcagatagagcctgcgcaatggaataaagtcctcaaaattgaaatgtgacattgctctcaacatctcccatctctctggatttctttttgcttcattattcctgctaaccaattcattttcagactttgtacttcagaagcaatgggaaaaatcagcagtcttccaacccaattatttaagtgctgcttttgtgatttcttgaaggtaaatatttcttactctttgaagtcattggggaattctatttaaattgtgtactgtttgcttctgcctagaactgttcttcactttaaaattttcattgtttcggaaccgagagttatttataaattgctgaatatgcaattctgtggaatctgaaaaatagctcggggagatggatgcatttgcacagatatctgtatgagtagaaactattgcaaggtacttatgctaaatcctccacttctgcagggcttccgtggtgtcattacagaagattcctttaaatcctctctatggctaagggctatagagcatggatatgaacttggggattttttttttcttttgcaggtgcagatgttttatttttaagaccatgttcttttgcatgtgtgtatgtgtctctgtgtgtatgtgtctctgtgtgtgtaactcatcaggactttatttacaaggcatgctatatatgaagggttgtattttagatgatattaaagcttttaaatatgatctttggagctaaggtcccggaactctgcacttatgcccagagagagtgttaaagttagagtaaagtgtaatttgttcttccaaaaaagaactccttgacaactcttgctgaccttgcatatttgtataatttaaacaaatacatactgtatatggaaagcagaaactttctaagagctgcttgcccaacttttctgtttagaagaggactttcatgggcaaagtttggacttggggttctgtgttataaaactctgattttatattcagtgtcgtgaagtccctttaggtaaatctggctgctgctgtcagtgcaccgacttctcgtttccgattgctggccgtagttctagtttccattctcagcaaaattatatccttcaagacttgtgtttttttttcaatttgcaagcgcttttaagctgctgtcactggctccaccgattcaattgcctgagggctcaattcataagacgtctctgccacttagtgcagcattcagttgctgctttcaaacacttcaccactacgactttccctagtcaagtaagtggctccaggagttaaagatacacccttgtcaggcacctgattctgctgttcctgagatgccaacacatgcaggccaccttgctttcaaagaaatgacgtcactgtgcatacatactatgtgatctagcagctggagtttttgtctccttacttaggggatcataaaagaggctgtggagcgttatctctgcattaattacaagttaagaaaattgtttccaaatgcacttttcatgctgtgtatgctgaacacttcagaagtggagctcttaataagttgttacttttttctgtacttgaagcaggaagtggtttgagggagctgcgtggtctttcacatgtaattcagtgggtaaaggtgtcctgcccagaggcagagctcaccagctgattgtactctgactctcaaggtatttccaagtgagtgagtcgggggaagggagtaagggagtggactggagcttgggtcactatctgggctgctacaataggcatacaatggaaataggtggcttgactggggggaaaagattgacttaaatcccagctgtgcaatttgttcattgtttcaatggacaaaaggcagtttacccaggctcataatagcatacctgcctgggtgtccaaatgtaactagatgctttcacaaaccccacccacaaagcagcacatgtttttaagacttcagttttctattcacatcggcctcataatacccaccctgacctgctgtaaaagacctggaacaaacaaaaatgattacacctacagtgagtattttcttatgactgttgccctcaaattttacagggcattttcattgtggcccagacatctggaatcaattaatattccatttatctaagattaaaaaaaaaagaacttttaaaatttgggtttgtgaatgatttttgagaaagtgttttctgatttttttttctttttttctcatgtctttctgattcttcccttttttttctatcatatctttcctttctctctattgatttcttttgtgtttggcaaaataaaaggccaaggaaataatgaacatatgggaccacttgtttcacactttaaactcctaagcaagttcggtattgttttcatttgtgggaacataaaattctctggttctctgtgggtgtactggactgttccctacactaaaggaaaatgcactagaggttctgtcttgtcctagaactgtaagtactgagatttatctgacaatataactcagcaaaaaaaaaaaaaaagaaaaagagaaatctatttaaaaaaaatcttaaattcttaagttccagagacttatatgtatcgctgcacttaaatgtgttatactagaactattaaaaatatagttttgacatctaatgaagtttgaaattcactaaggctataacttgagtaatttttttccctggatttcacaaaaactgaagaacttgaaggcatctacagttgcaggtgcttagccttcagcattgctatgaacgcaacaaagaagggaggggtggagaaataggattcggtagaataacatactttctagaactggcccattcccgcagtgtgggggtatgctctgcaagatcaatcacaggtttgttcttttgaaaaatgccacgaggtccaggtgggttggatttgttgaggtttccaatggaaatattgaacaggaaaaccccactaattttacaaccaaaaaaaaaaaaaaatgagaactggatgataacatgcttcttccagtcccagtgttttgggctatgtagggggtggaagatttccatgcggagatcttgttgagaaaaatgcagtaaatgttcagttgagcttttacctcctcttctattttatgtccattatttatgatcatttgcaaatagagggcgcttttcatcttcaactgctttacaaccattaactgaatatttatattttgttaacgagagacaggggttttggttttttttttttttcctcagttgctgaggtgaaggtctgactacaaaaaatggaaatcatcattagaatgatggggaaaattttgccactgatatagagccactaaattgagagtccatggagggcaaggagggtagtcagaaaataaatgactgtttctccaaaagtgatggggttgaatggacctgccactactctgaggttcaaaaaaaatgctcttcttataattatagcttccagcatgactccacaacccttttaatagcgcccctcacctaacaccctgtcagggactcttcccatgatgctgaaagtagatgcatctgagagaagtgaagccactcaccttgagaggcttcttggaaaaagccacatctttgtgccacaagtaacaatatggaaaaacttaatgatcatcttagcatggtttctactacttagagtgaggatgaagacttgagccacaggactgctgcttttggcaaggctgccgtttggcagtctatcattgactaagtcatgccaaccaggggtcccttggtatattttgctataaaatagatacagtgacacataagtccctccaagagatgaagccataattcctgtgactaaaaataaaataaaagatttttgccagtttgagcccagtgccctatacacagaagggattctcaacacgtgttgatttgatattggacttgaggccagggactttagaatacaggagtggtttctatttgagccaatttcattcttcgattctcatatttttttctgtttctgttattttcttctatttgtggttgtgtcaactgctgatatgccccaggtaaggaatcagtctctctctctctctctctctctctctctctctcatattgaggaaacaaaacaaaaacaaaaccctgtgatgatatatagtattgtcaaaagccattttttggccatagtaaattatttttagtcaaaaatagggaatgatgttttggttaaaaatattctgctcaataatgaatgcatataccatctatggatggccaatattgagagaatttaaattaacaaaacttatttggccccaaatctgtactgagcacaatttaacctttgataattcaaaagttctaccagggtctcagagtgatatgggatcccactgtaataatagcatctttcatttccgtagtaaacgtttctagatattttgtctcaattcattgaaataggaacccataaagaaagggttcagggaggactcctccaaagatccacagtagccaggggaataaacacaggttgttggatgccgagacacgctccatccacaactccctctgggttctcatgtactctattggcttctgtgctgggtagtcctgattaatgacagtcgtggaatcgtgggagtcaatgcacttctgtcccaccccactccccttgcaaggatcaaggaggaaacctgaccctccctctgtttcttgggcaggtgaagatgcacaccatgtcctcctcgcatctcttctacctggcgctgtgcctgctcaccttcaccagctctgccacggctggaccggagacgctctgcggggctgagctggtggatgctcttcagttcgtgtgtggagacaggggcttttatttcagtaagtagccctccctctcaatgtgctgctcaagtctaaagtgtacagctctgtggatttacaaccgcagggagtgtgtgaataactgaatgagtgcccgtatctggcagccatcctaggcctctgagattcctcaccttaaagtaagcatagtgttttggcgggactttggcaggttttgcagatctaggatggaattttcctccttaacaattcgtctttaactacttcctgctaagccttctttcaactattatgatccacctcactattccattcctttcaatgaaaggacaggacaaaataaccctgaggtattgatgtttttgttttcaaaacctatgggcgcacatataaacatatggaacacatgcagggctgctttaagtgctatgtgatttggagtaaaatagtaaggactctccagtcatgtggatctgggaaaaaaaatattaaagggcatatcctagatgtctccattcaatatgaaatcaccatgaacagacagaaggttaactccccttaaaggcaggcctgtttgcaaatacacagactgtctctaaatgcaaactgaaatgccatactgatttgccctctatgccacttgaccttgatttttttgttgttgctctcttttggcatagttcttctccgggacccatcaatgatatcaccatctggaaaagggtctctgacaagtacagaatcacttatctcttaaatagctcttaggtgattagaaagtcaacagccagtaaaaagtagacagccaagtcaaggcgtataaataatacacacaagcaaaagtcaatgattcctgtgggaactgatcacttaaagaatctagctcccatgcatctatctcactgtatattataggacagagaaagatttaaagccagatgcttgttccttataattctttggagttttagagagttccaggaaactgagcatgagtcattcttaaaggttcatatcactccagtgtagacagcttacctcagttacccactatgctttgaatagctcctgtgatgactcacacacttgaagtctctctcatccttcccaaatgtcagcctctctctaggcaggtggggtatgtgtgtgtatgactggcagggtagagggtggcctgtgtataccagtctggagatcagtaagggagatgggaagaaagaggcttgtgagggtattggcgatcagtacttacagtggatttggcaacaaatagtttttaaatcactagtgacaaagaatcagaagtgccttctactatttgaataggcaaattcccactatttgcttccagccagtcctttaattgaacgaactcatttatttttctggcaataaagcaattctatccagttctctgttgcagagcagatgaatgagtgcattgggtgagtgattttccaatagcagacttgttttacctttaaaatatcctgtggaagataactgtgggacatcacatgatccaacagtgggtcataattattctataatttgcagctactgatcctcattttttaaagaaatgaaaaagtggttctcacttattatgcccaaggggactttttttttccttgataatccatttgtgcaatttcctttgatccagttcactaggtaattgccaagcctagaagtgtcctctgttacgtgccaggttgaattgtgatgttcaacacgacattgctccagaatttccatgcacagtgcatgaaaactggatctttctatgcctatgatgtttgcattaaatgatgaaaaattagaatggaaaaaatgattgttcctaagtaactgtatgatacttataagtgtttgcacagacacttaaggatattggacaactaaaatggaaaccaatttccaggttctcttattctgttactgcaacaatcaaatttcagcaaatttttaaaaattgtatctcaataacttgaaaaggaaatgttatatatagcaaatcttgattcttactatatgactttagctagaaagtggctttgtaaatcatatgttcttgtcagtattgtcattgaaaatatgtgtgtcatgagttttgccttatagaattccatgacttatgttaatccgacataccctcatgcacagaagtgtccaacataccttcatgcccaaaagtattcttgctaactttctagtcaactggacaatcttatttgcccaaaagaaattagtccatttagattattttcatgtaattcaaaacattgatggagcatctgttatgtgtaagcattgaatgagatatgaatgagatgcctagaaatgaatgagagattgaccttgttttcaaggggcttacagttgagtggtaaaagaaaaatgcaactaagtattattgtcataagagaaaaataaccatggagaataaattatatcctttatgtttttcttgaatattttggtctaccctgccaagaataataccctgtcaatgggcttcttgatgccaaaggacatatttatttacatttgaatccaagtgtctagctcatagcctggatgctatagtagctgcccatatttgattgttgaactgacaggattgaattgaattgaattgagtctagttgaatccaatcgaatagaatggaattacttgtttgggatcttggtcttaagaaccatcaagaattaaggttgtcaagtactgtggacaatacttctcacctcatggttatctagttatttaataaaactgcttttatttttttttgaactgaaaaaatatatactaacaatgacttagaggctgctgcattttggtcatccccaggctacattgatgtctgttttgtgtctgagccaattattcctacaggcatcaattgttgtcaacaaatttcattcagtttccttttcatccgctgagatttactgtgtgtggagaagtcagctctaagcacatagtctttgaaatactttttagagggaagcattcttccccacctctatacactgtcagttgactcctattattctctttacacttattttcaaagttttattgtggctgtgacttttattttaaactgcttcaaatccattttggaagtacaatttttttagtagtagaaggcagtttctgattttagtttgaaattcaaacatctaaaagaaaattgcctccatatctatcatttttgtcaatctgcaatatttaacaaggagagtttttttttaactctattagaactgttctgaataaaatattttgtaatgcttactgtgtgtagattgacccaatgatgtgaattgagctcatattccccttcaagcccaagttccactacagcaagtgaaagcaaccttctagattatctgtttgtgaacattatcccatcataaatggaacagttcatgtataattaatgcagcttccctagacattttatgaaatgaaagacccaatgaagagctaattactcattctttcctatgcatcatagggaagataggagagcctatcagccagccttgtgttcttgcagtcctgtgagaaaaatggtggcataatggagatgaaagcacattgggaaggagctagcgattttcttactagattgatggagcccttataaagggtggctcattacaacctcattttgcatgaaaaacaccaagagaaaaagagcttcaaatgaaataggagaagtgaagcttaccatagatataatttttgacagccatggtgattaaccattttaacatgctgctatgggcctgtggaatttctctccttggagattcttaaaaaattgacagacaaccaaccatcttggatggtttcaattaagagcaactgaaagaaagagagtttctggggtctttttaagttttaagagtctataaacagtcccttaaataaactgtatatgctttaccttggcggtctggggaaatggagaagtaaatcaattagaaaagccaagttggatattctttcagctcttcaggatttatagcttttgtaaaacatacttccaatgtatagttattaagaacaggtctgaataaacgaatggcattcttcatgggttaaaacagactgttttgtaagagctttaagtgaaactttacaatgaactttcattgttattgattgcaacaaccttcttagatctaggttattattattaagtcaagcttctttcctttgatatatactgcccagaaaactactcccagacctgtcgttcattagttgtaggagtttggcaggcatttaaacttcctgggtctaaacgtccttgtccatagaacaagggaattttattaaaataaatgacctcttctagctttaacagactcatagtctaggttgtatttaacaaagctctggtgctattcaagaaagaacaaccttggatttaagtagtgaccaaataacatttagtctcttttatcttatttacatagtttctgttggtccccagagataggagattccacccagttaaagtaagaggagccagattcttcgttttgttttgctttaagctggatttcaacccctcggggatggaatagaagcttagatatgaccaaatacatgcaggtcttttggactaaggagccaaagaagcacacgcttcatgaaaacagactgtcatttttctttgttaggatagacccactgacagttctcatctttacattctctcactctcctgactgtgaggtcaagtgagtatgtacatttttagatgccctttattaaattagaggggacaaataagaatctacaggtttctaaaccttcaccaaaagcctcttcccagcctattaccttttcaattaaagaagagagtgtataattggtgaatttgacatcacactcacccaccattagcattgttttgagtggggctggatttgagttgcatcattttcattccttttattggtaccccttagactgcctgctatgcatctgtgtgacagctggtcaaagttaggggtacagtcactagctgtgggaaagcttttctctttgaaactaattggtacatgtggggtttgaccttatgaccctggcctcattagtaccactaagctaataggctacagatattattaaagagaagcaatgtgtttttatattgaccccaaatgcttgttcctgtctttaaatagtaaaggaccagtttctgcaaccataggaccactaagaaaatgatgcaaaattagaaaataatttgcatttttttctgacatgctaatgcccttcaagaccatctccctcctgatggagagttataaacaggagagcgaagggttcaagaccaagggcatggcctctattgccaaacacttcaggtttgaaccccagctctgcaacttacttggtgagtgatcttgagcaagttatttaacctgtttgttcctcaattttctcatctgtaaaatggggcctgccttatagagttggtgttaggattaaattagttattatattggaatatgttaacttagaatattgcctggcacacagtaagcaccacatatgtgagctattacacttaattattctcttctgagatcaattgcagaatctattgccaatgctgaggtatatgaacggcccaattaattacacactcattttctctccttggcggcagctgattaaaaacctattatgagtagtaagaattatgtagtagtattagtaataatcacatgaagaatgttatgtttatctagtatatttactttttcaaaatccagttgtatcagctctctcactttgtcttgactccacttttggtgggcaaagattattgcttcatgggacaaatgagaaatgtgagacatgaacattttgtaacttaccccactgaatggttccagaaacaaagctaggttctcttgcctccaagaagtgtgtagcatagggagatgcttccaaaatcccagtagtcttctgggagataaggagcaagaatcccagggtgactaaattgattttgaacactttcttgaaaagaggcatgagagagatatctatgtaatgaccctatattttagcttctggaaaaattgaggaaattctaagaaaacttcctcaggatgcacaagaaaagtcttcttttagaagaggctaattagaggctgctgctgtacaagacccttcacagactgaattcagacagaacactgcaactcacctgtatacaccaggatatgcagtaggatctggggagcttctcttctgcccaacttcaaatcttcttcctcttcctgcaaacctcaagtgcttcattacttgcaactatttgtttaattggtctttctcaaagacctactaaaaaaatgctgtttaattggaccaaactttttcttggggtgctattagagtcgtagtaatgggaggtggtcacagacaccataatccaggcaggaagaaacttccccaaaataaaggagatgtgggagcagccagtggttgggatgcaagaccgccacctttgctggtattactcaacgagctgtttgaagaccattggtattgaaatgtatcctatctccagtggctggtaggggagacattttggatccaggagagaattttggcattctgctaattcaatgggcctccaatactttgaccagacatcttgtgtcgtgccatcattgcccaagatctccattagagctgacttcatctcttcagcagccttccttctggttttacagcccacaccacagattcagacacagtgaaaatagccacaaggtctctcccaaggagatgtctcattgttctcgataacagcctgcaagggctttgctcttttgtgcagccagacatctttgacaacccatggtggcaaaaaatcgttttcgcattgagctgccgccctggcagagttccatcgtacacctctccatgagacatcccaaagaattactttaggttgcctggaaagttcaaacccccaggccttattagctgttagactaaggagatgacaacacaacattttgtttgtctttatctatacatgagatcatgtttaaaacatagcaaagaggtgttatttgacaagcaattccctaactgcagtaagttgtatgcctatttaatgcattgtttagtctcacattggctaaagccacttaaagaagcacttggcaagctctagcttttcattcttggcatagctgcccctcttactttttcactgaaccttaaataccaagaaaaacccttcacttactttacatctggcatattgctttctgcaactggccagaacctttgcatgtggccctctgcatttgtcctaaggtaattaatggctttgcaatatttgatcatcagcagcacagacacaaagagaaattgtgcaaccagcagagaccaaacagcctcttttaaattaaaatcttttgcattaaatgctcaggcattctgcaggaataaagatttccatgccaaaaaaaagaggggtcaaaaagaggggaggaaatacccaagaacctgattattgattaagtatacatctctgtaatctctccctcttaaaactacccgattgttcaaagaaaataaaattgaagattgctacaaacttagaagtccttgaaaaataaacttgtcaatattatgcaatctagtcatgtatcaaaactgcacttttaccccatacattcatgtacatgaaaatgataataataagaattagccaaatgctgactgaaatccagagagaagtgacatgtgcaaagtcacacagctaattagtgacaaagggagaagatactgtgattctcttttctcatcccactgcagtattcctccatttagcaacaattagccatgtctgtgtcaaagttacctggtaaattaaaatgaccaagagaagccaccaatcaaattcatccaaatgagcatagatcttgttggttccttcctttcaataaattcacctgagacttaggttaacacttttgctccctcgctgtggaaatttgtacaaactaaagtgattccctgcctgtctcctatatggtgtgcaaagccttcacatgtactttgggcattccgtccacttaaggtcataatttgactattattgtatattatactattctgactctatggtcactctctccaatgtcaactttggtagaaatgctttggaatgacttagcaaagctgcgctcctggaaaatctgaaacagtctgacgagttgttggatcagctttttttttctggagatttctctgactgtcccaaaccaaaagaaatttacacctgatttttttgcagactcccaagcaaatactctatgaatctcttctggttttcttctttcatctctggtctttatgaggtactaaaaggctctttgagggacccttttaaactttgaaaatttgtcagacatagaagcaatccggagagtattgctgggaagatggtactacctctgtgccatttaccctgatgaaatgggtctttcatcagaggcaagtgatttagaaagtctgcactgagccaacccacatgcagccaactcctgattacctgtaaaactggggaaaggagcaccaagacttagaattctggattaaatggatttaaggacactatagatttttcttctccctccttgctgaacctatccccaacctctttatgagaccaagtgatgtgggttttttcattttggtttttgtttttttgagacagggtctcagtccattgctcaggctagagtgcagtggtgtgaacaaagctcactgcagcctcaacctcccaggctcaagtgatcctcctaccacctcagcctccccagtagctgggaccataggcgcatgccaccacagctggctaacttttgtatttttttgtagagatggggttttaccatgttgcccatgctggtctcaaattcctgggctcaagtgatctgcccgcctcagtctcccaaagtgctggatttacagtcatgagccactatgcccagactgttttaaaatcttaccttattctcatactcctcagtcaactttccccaagcgccattggcaacagagtttttcagcctcaacactattgacattttgggtcagactattttttgctgggagagggagctgccctgtgcattatacgataactagtaacatacttggcctctatccactaggtgccagcagtcccttcctcccagtcacgaccatcaagaatgtttgcagacattgccaaatgtacccctgggggcaaaatcacccccgagtcgagattcctagactagacaagtctccagaagagaggcaattagagagattggaaaaccatgagtgaaagtaacacatcaattctcagtcactgtttaatccagagcctatggtccattgcctggagcaagccatgagaagagtcattgtggttttgaaagcttttctctgaaaaataaaagttcttcctataggctatttaaaaccttttgcaggccttttctttcttgccttatagccatggaattcatgtattttagtaagagaaggaagggcaggcagaaatggttcagagtagaaccctgtgcttagaagtttgattgagaccacctggagcaaattaaaaagaagttggttatctttatttatttatttatttatttatttatttatttatttatttatttatttgaaacagagtcttgctctgttgcccaggctggagtacagtggtgcaatctcggctcactgcaacctctgtctcctaggttcaagcaattctcccgcctcagcctcccgagtagctgggatgacaggcatgcaccaccttgcccggctaatgtttgtatttttagtagagacggggtttcaccatgttggcctggttggtctcgaactcctgacctcaggtgatccgcctgccttggactcacaaagtgctgggattacaggcgtgagccaccgcacccagccagttgtctttgaccttaacatatgtggctgttcccttgtcaggcacataataaataaactcaattcctcacaagtgaaaaagcctggttcaaaggtaatgaccaaatttttctccttttttcttgtgcctttcctatctgagtcctatcacagtcattcaattgctcagaaacagtcagaagttccccatttgggcctgacccagctcccctactgaacagttctatgaccttggagaagtcacttaacgtccttgagccttacatagcttatcgtaaaatgggaataaaaatacacttctgagttgttctgaggctcagctgtagaagtgctttggaaacgaagggccatccaaatagtcacaactgatgaactgaattggatgctttttgccttgtatcccaaatcatggctcacaaattagatcaatgccatgatttctgtaaaaccttaggcaacaattataatctggaaaagttaatttggcagtgtatcttctcaacctcattaattaaaaaagaaaagcatgttgctgcctcctgttcacatatcactttacattgagaccacccaagagttaattaatgtatcttcagaatgctcactcagtatcactatttcctctcattggaagaagcagcaaagagatggggcctatcattttaccacactgagcttgcttaaagactttgttccccacgaggtgattgggtagtcactgagagatatcacatataggcaaaagatttctattctctcaagtcagctattggtgatttctgcttagcctcaaaaagcagcattcagcagaggaaatgtactcactaatcagaaaaagtatcttcgcactctcaagttgtacatccaaactgttttcttatcacagcctgacttaggggaattaaatttttttgtttgagaatggctttgatgaaatcaaaattgtgagttttatcaccatatggaccagtgaccctgtggttcttctatcccaggggcctcacatcccatggctcccagagacacaacatttgatgcagttgtaacacttttgaaccacacaatcaaatactggctactgctactgctgctactgtaaattttcattctctctattttatcttgagctttttcagaagaacacagactaagttttaagggttttcccccctcctgtttttcacagcatctagtatggagcacttaataaaatttcttgatttgatattgaaaatgtcattccaaaagctatttccttcttccagtccccagaatatataccatgacttacaatttgctactgacatcattttggatctgagattgaagatataggagaaaaaagtcaacaagtctacttgagatgtcacctcttaggaccccttcaccactgctccactgaaaatgcctagctcaagattaagctaactctagtcaacaggtaattttcaaaggctactggaccctcaccaataaggtctacttatgaaagtgagaacagaacctccactcagttcctctctacttctatgtgagttatttaaaaggagtagtgttgggcaagggaaggtatgcaacaactggtacatccctggctaaggtatgaatcacagctggagcaccagcccttagagaacactacaagtggtttctatttgccaatgcagaattgaaaaattagagagctagaaagaaccatatagagcaatctgatccagtgctctcacttcccagatgaaaggaccaaggtccagaaaaaacatgatgtgcatgaggtcacaaaagttggtcggaaaagctggagctactggtcggaaagccaaggctacatttcagtcacctcatgcttggtccagagctctttgcacagctggaccctttaaacttaacctcaataaactcatatgagggtagtgctcataaccacagtccatacactcaaagtgaactgctatgtcatattcttctggtgtaacacctcagaatagtttctagaaaattaagctcttagccattcatgaaatcttcatttactaatttctaccatccatcggataacatcatgaagtctctttatcccaaatctgatcgacctgactgtaggactgtgtaccttaataaaccctagtagtttgagggattggaggcttacaaaagaaataaaggaaaaagctgattttaatttgaagtcaagccagcatgttgcattgctctctaactcagaagtgaccccaaacaaaaggaattatcgatgtgttgtctgtcttcacacattcctaacttgctagtcttccacgaagatcttccatgaagaagcttaaattttcctacgtagtttgagttttatgtttctttccattaaagtttccagccgttcatagacatatttagtttggcagaaggtagtggtgactcacggaatgaagaaatttgaaggcaaagctactgaaaatggatctaatttctttttggggtaatttgggagcgagcaattgataatttgtctaattttcctggtttcatcagctgccacactgccaaatatatgttccatatggatgctttgttattcctgaaacatataacaaatttcagctgcgactttatctaatatggtcaaagggtaagactattgttggctcattttctcattgtttttggctggacaccctcaatcaatggctattgagtgaaaaaacaggatcatattgaaaccattttcagcatgttgcttcctatggatccaaccatttcactgtgagtttgtcaagcacagcaaatgttctctattaaagggatgactgtgttctcaacatggatgcgactgccagttaattgcattcaccttataattccagtctctcaatttggtgtagagatggttttggctctccaaagattccttcttttctgctgattcttacctcctagtatggaacagatatttgaggatgaattttgagaagatcaatgacacacatacaataagcatcatttcaggcttcccttaagttagacagtctgtgggccctgagtcatatgaatcataagacttgtgaaaggtattagtgccacaaatctggctggcatttctgtagattatcggtgctttgcatgcaattatgaaaatctctcttaccagataagtcagatgggggttcagtaacattgcacaaaagcatcatgatgtgtaagctaaagacaaagaaaggcttacttctggctggttctgaagtagacactggccacttagtgttttaaagtcattcagtggatgattggtttcaatgaatataaatgattttgatctccctccccaacacacatatcaaaaacaacagtaataataaagaacagaaaagtctatctcttagaaaaaccagatttgaaaactggctagggaaagtgttttgtggcaagaaacaatctcttgtatctcttgtttacaacgggctaattggtttgattaacaaattgtctaaggggaatgtatcaatgttgcttaggaaaaacaaagcttagtgtgtgaaaatacacatagacatagagtcttgctactcaaagaaacctgagggctttttagaaatgcagagtcaggggccctgaccccaaaccaattaaatcaaaatctgcattttaacccgatacccacaggatttggatgcgtgttaaggtttgagaagccccatctagagaatggcaggaagtaagaggtacttgctaattcgtggctcacatttgataagacagagtacaaaaagatcaactgtcactgcagatttcaaaaatgatgttaaggtcaaacctgcttgtggccattaacaatatatatgctgattcactggtatttggtccagattccctcaagttggtggaacctttcctcagaggaatgatagaactgctccaaggataaccccatggcctgaccttctgtgaactggaaattggaacttctaattgctgtagctgcaatttccaagcccatcactggggccaggaactgagccccagtccttaagatcttgccagtttctttttcaatagttacatttttcaagaacagccaagcaagagtgcttcaaaaaaagaaaaaaatctaattgcattaagtggacgaatgtgtgttttactcatatcaaatttcatcttttgttatgctcagccagattctaatattatttcttatgggtctgagttaattagttctatgagggttcccactgggattttagagaaatggttttaaggtaagaaaagtctattttggtcacctatcagaaggtgaagggtaaactttaaaactgcttttcaaagagatacagctggcttcgggtctttacgagggtcattctgaaactcaagttccccagcctgagcccattaatgaaggtcattaatgaaggccttgatatctgaagggtgtgcttcttcaaagggacattgtcccacagcagggcaggtaaagtgagagaggaccagtttttaacttgtatttcttgaaatgacaataaaaagaaaggggggcctttggattggagacttagaaaatcttggatttactcagaactctaccactaaataacttggtagatttgattattaatcccctgggtctcaaaacctgttgccattgaaacaatgatacgtaaatgaaccaagacattccacctttgaaatgtgataattgtgatctctcttcccagtttggcagggaaaaaaagtcactaatatagttttcacattgttttcacacatcttttacttgaactttaagaacatgccacttcttgtctatattcttgacaaggataagatagtattggacttagaccaaaactatatatttgatttgtttagatttaatgcatattattttaatacagtgatatccctgactcattggcactctacccattgaattaatgttgacaagataatctctaataccttttccagaatgtttactgctgttcatgaaaatctctaaaatcccttaagaaatctgacggatatggagattattgtttgtttctttgttagtattctctcattccttttgctgggtgctttagtaaaatgtatggaagtaaaattatagctctgcccaatttaattgtagaatcatcagctgggcacctgctctgtgtttagcaatacccaagggagaatgatgccatcccttcaaagaggtttctttgtggggggacccatgaaattccaatcatacaactgcaggcttgagtcagatgggaatagttctcccctatggtatcccagtccacaccatctattgagtgtcttctggttagccaaaactaatgatgaaagaaatgagtaaagcacagctctatgcacatggaattgatattctagagcaatgtcacaaaacgtttccactcccaccccacctgcatctagtccacagacatgttttgtttggtccacccaatatgtatttgttttaattttggaaatataaaaatcaagagattataagcaaaaacaaaagattaacaacttctcttatgaaaaaaatggtgcaatccagcatggctgagcctgcattcttgagtggcagtttttggtcacccttttatgtgaagtgtgtgcccttgcaggcttaatttattcattatatacctatctggctcagcatacattgacctatgccactcctgctccaaatatgcaagatctcgttggatattaactatacgcttgtctattttattacgttcaagacatatctattgcctttgttctatcacatagttaccagactaactgctgctggtttatataaataagacacaaacctcatctttatagaactgtatagccctccccaaacagagcaagggtacagctgagctagaatttaaaagacaatcaagtcattctggtgaaggaagaaggcagattttaaaaactgaacattcaaaaatttagacatcatcaaagggatatttcctcaagagcaagtggagtttttagccggtgaccttgtaaagcaggaaaggccaggttcccagccaatgcaatggatgggttgcacaatcaccctaagtgttgagcacagtggagaccatcaacccaactcttcagacaaaacaagctgtagccttacagtttgttttgcaccgagatccataacagctgttacctatttactggaagatccttccagtcccatcactatttagatcctcctcatcgcccaccaaaactattgcaacagcctcctccatgatcgtgctatgtgcaagactgcttgaggccagccgtcccacccatgagattaatctttccaaagcaattcttatcactttatcccttttctaaacaacatccagggaccattcatggctatgtaaattgagtgagtccaaactccccaatttgacagtaaggcattttacgtaaggtctctatctgactttcttaatgtatccctacagcagagctcacaaactggcaatctgtaagttgtatccagtcctcataagtgtttttgtgtagtgaatacagtgtttttactaaaatttgaattatctgtcagtatttactaaatgactctccacttcatattggcacatgctttctgctttaccaaaaaccccccaccactctctattgccttgctctggtctacttcacttgcctgcatgacttgctgtagtcattgagacattgacttgattgactcaccaagtttacaaatgaccccctacatattccaacatccgacctatgtgacttattaccacctattttattttcctggactttcctctcttcttctctcaaatgtcacctcctctgtaaaatcttctaccagatgtcaaccctctttcctctgagagagagaagcaataatattactcttacagcactttgtttttggtttttttttttttttttggtcagtgttcctaccatctgcttaactataagctctgcaaaggtgagggctatgttttattaatctctgtaagttcccacttactccctcatacactgcactatccatgtctgcatggaattaattgttattcgtttttatgtggccttacaggcctagattagttatgtgtgcctttaggaaggcagtaactcatttgaaatgtagacatggctgagtcggaaggcctccatggacttttcggtattttcaagtacagagtgagaagtgctgtatctaaaggaaactactaagggaatttaggtaaacagaacatgatcctttttgttggaagctggctgtgatctccagattaaaacactattgcatgcctcatgaggagcatcagcaaatcctttagtatgcacaacttgtgttagaattgcaggagtcagtctattcctgggggctgggctgagataatgaattgagtcaatgccaggtagagcacaaatacgctagaaaaaatgaaacagaaagaactccgtatgctgcattcaaaagtgtcaatttctaaagtttctgaataactagaaaggggctcgcattcctgtttgccctgcagaaggattgtcaacaagttacaagattatagaatcaaatctcaggcaccagaaatggatccaacttagtgaattttgactggaatgaccagttgcaaaatattgaccaagaagaagaaagtcattatttttcaatgtcattaaattcagcaatgttttatggataactgtgtacctagaattgtgctagaaaccaaggggaagctgaaacgaaaaagccagagcagaaaactaacgttcatgaacacccatcatgctcccaaaaagtaacatacaaatctgccttaaggttaccttcaatctggttaagaaaacaattcttacccatatgtcagaataatcatcataaacctatagaattaaagtaagtaataatgtataaaaataacatttttttctcttattcttcctggatatggcagatctcaaaatatgtttactgaatttccaaaagaatacaaaaaattttcatccttctctctatatatacagtcttgtgaaatcgtccactaaagtttaaaagtaggtggaatttacaccttcatgtactctctgtctgcctgggtccttggctaggtagaggcatggttgtgttctatagactgagagaggccagaaatactgggcaaacaagccgctttgactttgagttgatgaaaagcttaggaaaaaatccctccttttgtagagctgccaggccagtctttccaactcaagttcaatgatgcgtcaaaattctacctggagtcatgaggttcccctcccatcttatcctctgtatcccccggtccagataggatttgatgcagataacatgggcactgttggttgcttttcttttagcatgaggattcctcaaaacagagttttgttaataaattaagcagaatttgagtgaatttaagcagagtttgagaatttaagtgaatgtctgggtatatttgaataatatttattttgctatcagcatgacaacattggatatcaaaaagagttctgaatatgaggtgaggagacctggacaccctgaaaagccttgaattcgctggttggctgggttctgtcaggcaattctctcccttgtcaaatgggtacagtcagccctgcctgcctacccaaagcagtttttttagtaccaggagagataatacctgtggaattgccacaaaattcttagaaaatcaggacccgctaccagtttccagaggtaatttgagtgaagtgttgttagaattgagggagggctaggctagagtacatcctgaagttgaaagtgggttagccaagatgcattcatgccccttcctttggaacgtggggactgtcattcctttttgggtcatgtatgatttctgtggactggaattacaagggcaaatgtaggaattgctgtaatattggtcagtacttttcacattccgccatcccatgagtagggataagaggttaattaaatacatctctcgggcagcagaaatgatcaaggctgtccctggaacacagttgcttcaaaaagtaggcttttgtttcagggaagatctcccacagagaagcatggaacgccaaagagaactataaataggactatcatttatgtcaattataaatagatttgttcccttttgattagaagattaatgctagctgaaactctgtagttgagcagaaatgagggaaaaacttctgacaaaatattattacatgctaacagttagatttgataccttttcctccctgaagtattttctctgattttccctaaatgaagactttcttctcgtttgaatttatgtccagtttagtctttgaagtgcgtttgttcatacttcttagctcctcaggatctctagattagacaatacacacacacacacacacacacacacacacacacacacacacacaccttttttaaatggaaaaaattgaataagttgaatgtccgtgttaggaatttaaaagggggcaaaactttctcctcagatgctcctaagatggccactacgccctcctccaaaattctgctttctgtgagggagatgttttaccaaattaccatgtacatatggttccttagcaacccatattaacactgagcataatgaccaaagagataaaggaaaagatcagtagaggaagggccataagccatcgctgctgagcacctgcctgatatggagccatattttttcattctccaggaagcgatatccaatgggatcccaactctttacatatggttaaccaacttcttgtccttgattgtgttcatgacttgtctcttcccagggccagagagagaaatggcaacttcccatccaagctgactgccaggttcaacctgggaggagagattgcagggtgcctcagtcctctactggacatactagaatgctggtctcttccctgctaggatgacaggatggggaattttgcctgagtctgcccaacttgcctcatggaggcttttgatttcagctactgcaaactaagcattaaggaaaggggtgcaggtagagactggaagagagggtagatgcaatgagtggagacctctgtgtggaactcctcccccacttgaaatgccctattctggtttcgctgtgagatatttcaaaatgaacttaacttgtcaactgaaaatgtactgcctgacctgagatttctggaaaaacatgaatcagaggtttggaaagtctgggttctaactcataaagaaatatattgaatatttataaagatataacattcttagaactgtttctgtgtgtgacctctctcttccaagtggcattgctcaacagcccagctctcatcagaaggctgacattatgctgttgtgcaacttgcagccatagcaatgtcactttgttaactgcacttgctgtgcattcaactattgagaagccaaacagctttaagtttgagtcagaagttctaggcaggatcattcttgtgaaacctgaacccttagttcttctaaaaagtcaaaatacatttggatcttgcaaatcgagaatgtcagagccaatattttcctctttaatcaaaacccaggaatggcacggtgggtggctggggccatgtcctcccttcttccctttcccttcccccacacttccagccaagattctccaggcttgagagagctgatgtggaaaagcagctctggcccttgtgtgttcagccctgaacctctctgccaagcaccacattaatggtggacactaacgcattgtgatatagaggcatgagcctgaaatcaccaatttgtccccagactgataggtaaacagcaaataggaaagccttcttcttccctctcatccctgcattcccaaatatttggggctctatccaacagcctggatctgcagcaaacatttgcctctgactcaattgaccccttcatggcgaatcttacatccacattggataactctactggctcaatctatgaacaattttcaaaattgaggaaataaggcccttttccattcttaaataggctggcctaaatattcttgggagcttcatggagagtgtcatgccctggcttattcgcaaaggtggcaatggccttcagactcagctaagacaaacattggcacatgcaggtggccatcagatgttaatgtttatcttgttcctctgtattgctgttatctttcagggaaatctaggaatagcagaaagatgaatctttccttccccatggggcatgtacttccttctagggagtaggaagagaaaaccctctcattccctagacctcatgagttactctggagggttggtagtagccatggttaatggcaagcttcagaagggaagagcttccaaaaccttgccatgatgcctgtgaagtgctgtgagagtactcatgtttctctggaagtcacatcatgtgtttaaggtaggccttgtacagggaggattttgatagatggaaaaattctggacacagaaactaactcaatagaagagcacatagacagcaaagtaaggagtatgtttgcaggtgcatgagacatccagccagttgtttgggtgttaggctagtgcagagcagtgcaagataagcccagaaagataggttggcacatctatattgaagaattataatagctagcactttccaagctcttatatgcatgacactgttttaagcacttacatgtattaactcactgaatcaccaaacaactctgtgaaataggtactatcattatcttcactttacaagtgaggacactgagacacagagaagtacagaatgtgattaaaggcacatagattctaagtgcaacgaatccagggttttaactcaggcagcctactcaagcacgcatggtacctgacaaccttgacagcatgctctatagagcatacatttattctttgcttcttcttccatccccacatccctagccatggaaatgctgagtaacttttaaggccaaactcatctctttcctagcaatgcctcttccaacttcatcataagagaaacttatctttccctgttagaggcctctctttttttgtacatacagtaattttcccaaccttacttatattagagttaagaatgtgttcatctgtgaacttcttcagacaagaattggcatcatattcctctgtatgtcctcagaatctgggacagtgatttgcatgtagaaagtgctcaattaacattgcctgagtataattgaataccggaggccactaactgaggcctgaagaaaagtttcctaatcctaccatacctctttaagatcatctttccaaattcaaaacaaagcaaaacaaacaaacaaatgccaagctctatagggaactctcccactcctgaaaacctacatcctataaaaaacactttggaaaagcacaatgtagaccctcctaggccacacacctaacacattattccagctttagccttgcttgactgtaaaagaatgctaatggcagcagtgcttctaaaggcaaaagcacagccacacatgaatgatgtatctcactaagaactgtggggttccaggatttctgagaagactcctttcattctgataaagttctcagcttctcgacccccaaatcctaactccctgaggaagattcaaaaacacccaatttaattaaagcctttttttttctcatattgaagtcacaagttttcacagggtgcaacgtgttgctaacccagcaatttccagacaaggctgctcagcaaagcaggtgctgttttctttttagggcccatgtccttaaattgctttgctgctcagatgtctcaaaggtccaagtttctctggcagattccagcccaagcgctcctctttgacccagctctttctggctcagaagacttctttttcccataggtgcagttagccaataagaagagaatgtcttatctttttaaaaagtacacttccaatgtcttcattagttatcttcaaactcagagggtcaataatcacagcaagaggagcaccatgccttctggaaggatgtcaaataagcatgctgaatggcctacagttttgtaattggcaagacccccctaacacagattgagtgttacagatctgcaaagttcagtgctaaaatatgattgattagtgtgcaaatatttactgagcatctattttatgacaggctctataacagatgctagggatatgacatttgtatgagtccattctcacactgctataaagaactgtccaagactgggtaatttataaagaaaagaggtttaattgactcacagttccacatggcagcagaggcctcaggaaacttatcatggcagaagaagtagacatatctttttttttttttttttttttttttttttgagacggagtctcgctctgtcgcccaggctggagtgcagtggcgcgatctcggctcactgcaagctccgcctcccgggttcacgccattctcctgcctcagcctcccgagtagctgggactacaggcgcccgctaccacgcccggctaattttttgtatttttagtagagacggggtttcaccgtgttagccaggatggtcttgatcttctaacctcgtgatccgcccgcctcggcctcccaaagtgctgggattacaggcgtgagccaccgcgcccggccgaagtagacatatcttacatggtggcaggtgagagagtgtgaagagggaagagccccttctaaaaccattagatcgcatgagaactcactcaccatcatgagaacagcatgggggaaaccacccccatgctccaatcacctcccaccaggtccctccctccacacatgggaattacagttcaagatgagatttgggtggggacacagccaaaccctgtcaacactgaaccaaactgacagggttcctgcctcagatgcttagaggttagccagaaaggtgaacatggccagtgccaaacaatagcaaggaagggagagatccctgtgcactggaatcatctgagcggtgagctatacagtatattcctcaagttttctttccttcccaatggttggaatatctttctcatcgatctcccatcttcttttcactttctcttcttttcatcatctacagcatgcattgttacacacccactgttacaaaaactggtattagatttgttgtggcaagaaagcctcactgtccacaggcctacatcttagcaccttgatcttgagcttctagaagttctggcttcctggaagttcattacttactctgcgtaaacaaatgaaatagagagcaataaaatgcgctcagtaattctcacattatttgtttgagatatactgaaattatctacagaaaggagagcaatactctcttatccttgaagatcaaatgcatcaaagagttacaggttttgataaaaacttcattgatgaacttaattcctatccaggagtcaattggtctacgtagaagagtcctaagaatagaaaagctacactaggtgtgcagaaccattcttgaaattctgtatatgaaactgtgactcacttgatataactttagagtgtatgttttgacacctgcttattttcttaccagtagcctttctggttttccaaaatctttctccttgttatccactgacaccatcagactaacctactataacaggttaacagactaagcaactataactaatctactataaagatcttttaaagcttcttcaaggctgaacctctgtgactctgcattcctagatcccaaatcctatcttcaattaacagaggtttaggagaaatgacccaagatccttcctctgaaaacccgcccaaagtattattgaaatcttattcaaattggaaagaatgatttaaaactagagacagagatggaagtatattattgtattgacaaacagcatgtagatattgagaaaatgaaattaaatgtagcaagagaacttatttaagtctcccaaatgagtttgaaagaaaggcaaatgtgccctgtatctgtatttgccaacacagaaagagtaataataatcatctccagattagatgatgaaggccttagccttcagatggaaggcgaagaagagattgaaaaatctggaaatgcagcattttatcaagtcgaatttagtcccagagcaattgggcatccatttgtctccaagtggagcagtgtacgatggctgtttccattcgtggcagagagctgctggggccatcggagcaagagatgcttcacaaagaaagtggaaagcagcgccaaaaggcaaatacaattcctgtcacatccaaaatagttcatttagctctttatgctactctcttactctttgtcatggagcaatttctaggagagtcgcataaaagtagggagatttttagctttgagcagcaaataagtgaactgggcaaggagagcatgaaatttagtgaggaaaaagaaaaagaatgacaggggaataatataaaaaccctgggaagaaagcacttcccctgtagaaaatctactatatgaaaagtcactcctctaaaacagatatactcaggatggattttctccattcggaagagtccatcactttaataaaacacttttgaagtcttcatctcgtaacctcacgtttaacatgtctgagcacttcttgagaactcgccctctctctatgctactggatgagacgaaaggagaatccgtgagcccggtgttctttggaggcctctctacctacgcacatttgtgcttcacttctgccaagtgaatataatatgacaaggcttagaaagcccaggtgatccagagggcaagagtttgtgtcaagaatagaggtagaagaaccatcgaattatagggctgtaaaagaccttgaattcataaaatccctccacagagaaggggttaggattcaaccctagaggaatgtcagcacaggcctctctcaggatgtcccttctctgacatcctgagagaggcctgtgctgacattcctctagttggggggcgggatggggaacaaataactttactgccttcctgttctgcaaacagaaaaccgtagcaatggggtatcataccaatttttcattattattatactttaagttctgggaaacgtgcagaatgtgcaggtttcttacatagctatacatgtgccattgtggtttactgcacccatcaagccgtcacctacattaggtatttctcttaatgctatcccttcccttgcccccaccccccgactggccccactgtgtgatgttcccctccctgtgtccatgtgttctcattgttcaactcacacttatgagtgagaaaatgtggtgtttggttttccgttcctgtgttagtttgctgagaatggttttcagcttcatccatgtcccttcaaggaacacgaattcatcccttttcatggctgcatagtattctatggtgtatatgtgccacattttcttcttccagtctatcactgatgggcatttgggttggttccaagtctttcctattgtgaatagtgctgcaataaacatatatgtgcatgtgtctttatagtagaataatttataatcctttgggtatatacccagtaatgggattgctgggtcaaatggtatttctggttctagatccttgagaaatcgccacaccgtcttccacaatggttgaactaatttacactctcaccaacagtgaaaaagcatttctatttctccacatcctctccagcatctgttgtttcctgactttttaatgatcaccattctaactggcatgagatggtatctcattgtggttttgatttgcatttctctaatgaccagtgatgatgagcttttttttcatgtccgatggctgcatatacgtcttcttttgagaagtgtctgttcataccctttgcccactttctgatgagatttttttttttttttttttttttttttattatactctaagttttagggtacatgtgcacattgtgcaagttagttacatatgtatacatgtgccatgctggtacgctgcacccactaatgtgtcatctagcattaggtatatctcccaatgctatccctcccccctccccccaccccaccacagtccccagagtgtgatattccccttcctgtgtccatgtgatctcattgttcaattcccacctatgagtcagaatatgcggtgtttggttttttgttcttgcgatagtttactgagaatgatggtttccaatttcatccatgtccctacaaaggacatgaactcatcattttttatggctgcatagtattccatggtgtatgtgtgccacattttcttaatccagtctatcattgttggacatttgggttggttccaagtctttgctattgtgaatagtgccgcaataaacatacgtgtgcatgtgtctttatagcagcatgatttatagtcctttgggtatatacccagtaatgggatggctgggtcaaatggtatttctagttctagatccctgaggaatcgccacactgacttccacaatggttgactagtttacagtcccatgagattttttttttttgtaaatttgtttaagttccttatagattttggatattaccctttgtcagatggatagattgaaaaaattttctcccattctgtaggttgcctgttcactctgatgatagtttcttttgctgtgcagaagctctttagttcaattacatcccatttgtcagttttggcttttcttgccattgctattggtgttttagtcaggaagtgtttgtccatgcctatgtcctgaatggtattgcctaggttttcttctagagtttttatggttttaggtcttacattaaagtctttaatccatcttgagttaatttttgtataagatgtaaggaagcggtccagtttcaattttctgcatatggaaatgggctaaatgccctaattaaaggcacagactggcaaataggatagagtcaagacccattggtgctctgtattcaggacactcatctcacatgcaaagacgcacataggctcgaaataaagggttgaaggaatatttaccaagcaaataaaaagcaaaaacaagaagaggttgcaatcctagtctctgataaaacagactttaaaccaacaaagataaaaaaagacaaagaatgacataatggtaaagggatcaatgcaacaagaagagctaactatcctaaatatatatgcacccaatgcaggagcacccagattcataaagcaagtttttagagacctacaaagagacttagagtcccacacaataatgctgggagactttaactccccactgtcaatattaggcagatcaacgagacagaaaattagcaaggatattcaggacttgaactcagctctggatcaagcggacctgatagacatctacagaactctccaccgcaaatcaacagaatatacactcttctcagcaccatatcgcacttattctaaaattgaccacataattggaagtaaaacactccttagcaaatgaaaaagaatggaaatcataacaaacagtctctccaaccacagtgcaatcaaattagaactcaggatcaagaaactcactcaaaactgcacaagtacatggaaactgaacaacctgctcctgaatgaatactgggtaaataacaaaattaaggcagaaataaataagttcttagaaaccagtaagaaaaaaaagacaaaatgtaccagaatctctgggacacagctaaagcagtttttagagggaaatttacagcattaaatgcccacaggagaaagtgggaaagatctaaaatcgacacctgaacatcacaattaaaagaactagagaagcaagagcaaacaaattcgaaaactagcagaagacaagaaataactaagatcagagcagaactgaaagagatagagacatgagaaacccttcaaaaaattcaggaatctaggagctcattttttgaaagagcagcaaaatagatagaccgctagcaagactaataaagaagaaaagagagaagaatcaaatagatgcaataaaaaatgataaagggggtatcaccaccgatcccacagaaatacaaactaccatcagagaatactataaacacctctatgcaaagaaacaagaaaatctagaagaaatggataaattgctggacacatacaccctgccaagactaaaccaggaagaagttgaatccctgaatagaccaataacaagttctgaaattgaggcagtaattaatagcctaccaaccaaaaaaaaacccaggaccagatggatgcatagccgaattctaccagaggtacaaagaggagctggtaccattccgtctgaaactattccaaacaagagaaaaagagggactcctccctaactcatttaatgaggtcagcatcatcctgacaccataacttggcagagacacaacaaaaaaagaaaatttaaggccaatatccctgatgaacatcaatatgaaaattctcagtaaaatactggcaaactgaatccagcagcacatcaaaaagcttatccacgacgatcatccctgggatgcaaggctggttcaacataggcaaaccaataaacataatccatcacataaacagaaccaatgacaaaaaccacatgattatctcaagagatgcagaaaaggccttcaataaaattcaacagcccttcatgctaaaaactctcaataaactaggtattgatggaacatatctcaaaataataagagctgttcatgacaaacccacagccaatatcatactgagtgggcaaaagctggaagcactccctttgaaaaccagcacaggacaagaatgccccctctccccactcctattcaacacagcattggaagttctggccagggcaatcaggaaagagaaagaaatagttttcaaataggaagaaaggaagtcaaattgtctctgtttgcagatgacatgattgtatatttagaaaaccccatcatctcagccccaaatctccttaagctgataagcaacttcagcaaagtctcaggatgcaaaatcaatgtggaaaaatcacaagcattcttatacaccaataacagacaaacagagagccaaatcatgagtgaactccattcacaattgctacaaagagaataaaatacctaggaatccaacttacaagggatgtgaaggacctcttcaaggagaactacaaaccactgctcaaggtaatcagagaggacacaaacaaatggaaaaacattccatgctcatggataggaagaatcaatatcatgaaaattgccatactgcccaaagtaatttatagattcaatgctattcccatcaaggtaccattgactttcttcacagaattagaaaaaaccactttaaatttcatatggaaccaaaaaagagcctggatagccaagacaatcctaagcaaaaggaacaaagctggaggcatcacgctacctgacttcaaactatactacaagtctacggtaaccaaaacagcatggtactggtacctaaacagatatatcgaccaatggaacagaacagaggcctcagaaataacgctacacatctacaaccacctgaactttgacaaaccggacaaaaacaagcaatggggaaaggattccctatttaataaatgatgttggggtatcataccaatttatgagatggtcatttggctcttgagtggaggccacctctcagtgactcagcaaaatttgtcctctgcacggtccttgtatcttgtaccacctgaggcaatcaagtatattctgctttatatcatagttatttatgagttaacgcatctccttactgggtcccaaattccttgaaggttgcaactttgccttgcctattcattttcacatactacgcggcacttagggcagtgctttcaatgtagcaggtaaccaattgttttgcttgcttttaaagtagttgtttttaaattgacttgagcttagttctgcaagaagactagatgagatatgattttgtcatcataaatttaaaatgtccttaatattttcttaatatttaatctataaagagtattcctggcacatagtagacagtaaataactttgttgaatgaacttacgcgtaaatacatcaatgactgactgctcatggagggtgccccctttttgcccatgaagttgaggtggtattgggagaatgctttcatttcctgatcctaactctcctgttgcagtctagtattgtcaatacaaaggtgtcatcattaccgttaatcccaaactgatgtaatctgaacttttgctctgtgtaattacagatatggggtacatttcctagaaaagaactgccctggacaaaactgttaggtagaaaaaaaaaaaaggaaattgggtgtcttttttccatattgtcaagagcagagaggacctcactctgccccctccctcttgactcctcacacccaatagcagcaccaatgcctgccacagaattatgagcacttcagccgggcgtggtggctcatgcctgtaatctcagcactttgagaggctgaggcaggcggatcacttgaggtcaggagttcgagaccagcctggccaacatggtgaaaccccatctttactaaaatacaacaattagccagacatggtggcaggcacctgtaatctcagctatttaggaggttgaggcaggagaatcacttgaaccccgggaggcagaggttgcagttagccaagattgtgtatcattacattccagcctaggtgacagagtgagacgctgtctcaaaaaataaataaataaataaataaaaataaaaagttacaggcacctcaaggttgcctgttttttgcctactgttgcttcagttatgtactctcagtgatctgttaccttcctttccagaaactctgtgtaaatatatcttaattcaatgaacaaagccataatggagacattggaggcattagtagccagccagtgatctgttgttttgttcattcaagaggaggttatcatgaaaatactctgtgagaaacagagttccaggattacactggcttaaacaatatggaagtttgtttctcttatgtagtagtcccaagatacatagttcagggctgctgaaccatctgctgtgcaaagtagctctatgccacaaaatcttcaagacccagcaatttctagatttctatttcaccatcccagcatggtggccctcatctgcaggggccaagatggctgctggaggttcaacattatacccatgctctagccaataggaagatagaaaaagcaaaggatgcattttggttgtcttttaatgaaggatcccagaagctttcatgtgacactttcacttatatttcatttcctagaacttgaacacatagccacacagagttctaagttaggctggaaaatacagttagctgaaaattagggtttctattactgcagaaagagggaaaatagctattgggaaattactaggaatctctgccaaagacgctatccctgagctccttacgttctaccacttgagtgccccaaatcaagacactacaaaatgaaaggttgatctagtgtcagccagatctagatgccagtcctattagcatcacttaatgagctttgtgatctctgagccattttccatgctatcaaaaacagcaataacacctccctattaggttcctgtaggatgatataagataaccagtggtgcctagcacagtgcctggcatatatggtagatacttagtcaacatttatttttaccattctttctgcatataagactggctcagctccacagtttatatcaacttgggcacaaaaacattaacaaagttcctggcggccatatttcttgagcaattttatactctatccattagccagatgtgttagagcaaatgagcggctgctcaaaagaatgtctttatcctcacttgcctttttttcctgttattgttggatggtgccaaacaagacagaagcaattaataaacttgtcagtatcataagagatgacaattagaatcagcagagcttaaaaaggagcctgaaatcataggggttgaggtagtggggtttttaaaatgcaaagagcatgccttttcacttcactctgtttatcaggccaagcaaactaaagtgaaaagtcactgtggaaaaaggtgaagaaaaaggtacctattttgcatcacccactatgtcatatcaagtaaatgaattaaaatcccatgtcaagtactgggctttattccccatggtttcacaccaagtttctcttagaagatactctaagatgcactaagctttcccattcacttctgtctaggcaggaagattctactcaagttaagaagcagtgttgccagatgcagtggctcactcctgaaattccagcaatttgagaggccaaggcaggaaaattgcttgagctgaggagttcgagaccagcctgagcagcatagtgagaccctgtctctacaaataatcaaaaattaaccagacatggtaatgcatgcctgcagtcccagctactcagaaggctgaggtgggaggatctcttgagcctgagaggttgacgctgtagtgagccacaattgcaccactgcactccagcctgggcaacagtgcaaaaccctgtctcaaaaaaaaaaaagaagaagaagaagaagaagaagaagaagaagaagaagaaggagaagaagcagtgtaatagaatgacttagtgctcagaaagtcttgagtttggatcctggtttgggcatttaataagtgagtggcctgagacaaataaataaacttttctatggctcaatattttcaactgtaaagtgaagatgataacagtgtccatctcataggattgttgtaaaaggtaaatgatacagcatatgtataaaccagatgcactcaggttttccagtctccttgggtcacgcttttctccaatatctacataaaataacctgcaaccccttttcacattccatgggaagcccatcctctgcccacgagctctgaagatttggggtatcatgcttctctcaagttatttcactctatagcctgcttcccaaatatggcccactcccacttgtcattcctgaaaccattattctatgttccctgccccctttgcttcagctcatctaaagggcaggaaaacgctggaagcaggagagtcatgagtgcctgaaattttgcaggagcagcaggcagtaagagtgggaggacctgagatctatgatagtgaaagacatgatgcaatatattgcctgcctggttaaaggagtagaaaggagtcaaagatgactgtaacattttgagtctgagtaagcaagaagataatggtgcagataccagcaagtccagaggaggatttgactttgttgacttgactttggttgacattgactttggtcaatggcaaagattgactttggtttcagagacactgatgtataatagagcttttagaaaataattcccatgagtcactagggtgcctgtccaaagtgcagtgaagggactgcatagaagaagaggcttggagatttccttgtacaggggatagctgaagcatattccccaacacaatattaaatttgtaaattacctttaaaaatagaaagaaaattgccattttagagtctcaaaaggactgagcaccatctaattacatcacaaatgatctcccaaaaaactcattcctttagaccaggagatgagtttctattcattattatttttgtagctaaaatttcaaatcacagaatcataatatattgcagtttgtttaagccttaaaatgttcctggcccaaatgcctcacttaaatacggggaaactgacatgctgaagagtctgagtgacctatccttgttcactcaagttgaataatgctgccagaaattctactgttagaatttctgctctcccttgctcattttttcacctgcagtccagctaccaaagataggattttagacattctatctacatttaaaatgttccttctaactgcagcggaaacacaggtagcaaggagacagtgtagaataaggagccagaggcctggattttagtcccgtggaaaaagaaccagccgcactacctggagagaatcatttggtcttccaagttctcagtttcctgatttgagtagcaaggagatgggtctggattcgctctgaaatgtcttgcagctctgacattccatgattcttggagaaatcggctatctccaactgaatccacatcttccaatcccacacaagatggagaagcaggcccatcccagtatttggggaggcccatcaggaccaaagctgtcctctctctgtgggggctggagaagggaagcagctgaggcaacacaaccagtttccttcccattcagaagagaacaattgagctcctcccaggggaagccatgcggatttggacagtgtggggtctgtcttatgacaggaatggaggatttctgtagaatggggatgcttagcggccgtaagaatcaaagatggaaggaaagccaagaggtccttaggtccggtcccttgcctctagctaagccttccaaggcagatggttgtcatcctacatttaaagatctccagagtagcaattgctcagcttcccacagcgcctggggtcagcaagtttccccttataatcaagaaattcttcccgatgtttaagtggaaatgcttccaatgtggcccgagtctgtttacccttgtctagtcctcagaagagatgaggaataatcttctgtgtaataatcactcttcttatgcctggtgctggtgattaagtcacttcttagccttttcttttttgggctagatcttaacttcattttccacccagttaatctttttttttttttttccttctcctagctggatcttttccaggttctccaaatgagccttaaaataggagaatgaaatctgagttcccactctaattaaaacctcagcaatgccaagttttgtggaaagattactctctaggctttcgtttcataattctctacatacacccgcctcatattacaatttgttgtagtactttcctgctcactcagggcccacagctattttgttatagtacttgtctctgccagatggagcccatttttgtctattttaaacatctttctgtttttaatgacttctcgtttctaaattgttaaaggtctccttaaattcaaatcctaccttctaatgtttctttacctgacttagtgccatctgaaaaacattctagtccattactcatcattgaggaaggaaactcaattttgtatcaatccgagaagggcctgaatagcactcatttctcccaatactcacaagcatgctttgagcatgaaaaaaaatgcaggccaccccttctccattcatttattcatgaaacatcttttgaacagggtagacactggacacacagtgatgaacagtttctgtatccattcactaatgtgttcctacatgtgtacaaaatgtactccttaagcacttactctgtgtaaaaccgttgcaagtgttgtggctacagcagtgaatagggaataaaaggctactggcttcatagatcccacattccaatgggtatgggggaggacagagaaaaattacaagtcaagcaacaaataaacaagaccatgtcaaatttgataaacgttttgaaagaaataataggatgatgaacctgaggatggtactgcctttgatggattggatgggggaggtccctctcagagggagaccctgaagacctttcagtttagcagagttatgttattctgaaccaatcccataaagcaaacccacttccctcatgttttcttctgacagacccagcactaactttttctggggtgttcacggtttataatgccttgttactcagtaattgtttacattcccaaaggactctctcatgttctttaattgaaagaagagataaaagaaggaatttaagtatacaggcgcctttgttcctcaggaagttaatggacattcctggaaaatgagagtccggtggtctattgtgtggagaaagtggacttcagtaccatgaaacagatttcttcactgtggaacttgaataggctgttcctcgaccatcttgaataggctggtgaactttaagactctgcaaaataagataacgtttacagccgtttcctaagctttttgcacggaacttcttgaacaactctttggtgaatgctgagctgaaaagatctcttggatccttaggtgtcctttgacataggatttggcatttgggatgtgattccaaatcaccagcagccaatgtgcaggccagtcgtcgatgtctctgaagagtgtgatagaaagaagaccgcagaggaaggcagggagtccttcctgactttgcctcagcttctcttgtgaccctggtcacgtgtgaactatgcttctttagttttctcagatcatggaatcttctgagaatcttctgagtgtctaaatgtcctctttccaggaaaatccacaaacatacataattatacatcatgcagagggttgatatgcctcctaccaaaatgcatctctgaactggaggatttctaaggatctgtctgtccagtgtgaaagttcaaataggtttctgctctggtcatattgacatcttggtgttttggtttgtatgcttgcttttaattgacacataataattgtaaataattatggggtacacatgatgttctgatacatgcatacattgtgtaaaagtctaacagggtatttagcatatcgatcacctcatgcctttatcatttctttgtggtgagaacattcaatatcctcttttttagctattttgaaatatacaatacgatattgttaaccagagtcaccctattgtgcaatagaacaccagaaattattcctcttgtctaactgtaactttgtacccattgaacagtttctatctccccacctaactaatgctccgcagcctctagtgaccactattctactctctacttctattagattaacttatttagattccatatacaagtgagatcatatagtatttgtcttttgacattagtttggacaagaccccaaaagcaaaagcaacaaaagcaaaaatagacaaatgggattacatcaaactaaaaagcttctgcacagcaaaggaacaattaacagagtgaaaaatcaatcttggtccatgtttttgattagcttgtgtgctccttgggacaaaaccaagcatcctaccacctctcaagcttccttcagccttcaccacacaagtggtgctaatatgtgtttctgcacctgtgccaggttcctctgcagagtcccgaggtggccgttgcatgagagactgctagggaggccagggagacccctccacacagaggtaccagccagccctggggatgccccgttgacttctcaatgagtgaatgaggtcatttttcctctgtcttttccagaaatagattcgttgagaaggcatatgctgaaatgacctagcaaggcagcaggaaggaagtgactagaaagagaatcattaaaaacccaacttcttatttaaaggaaaatggaaacaggggcctggaggaatgctctaattgggaagccagcagtggcccctgccttccctcccagtgctcccaatatggatttcctgcctttgggcactgttggatttaaagctatgaaagcctcatacacagtctcatcagaagggctcagaaaagaaacagagcttcatgtgccttcttcctgccacttatgtatggaatcagttggattaattaaccctgtttcctcagtgagattgattctatcactcgctcgagaaattctgatgattaggtgtaacctaactgataaataaaaaattataattttttttttgcaaaattaaatgtcctctgctttgtataattactgtggttctatgggcaatcatcagtggtatattcccttccaccctcctttgccacaaattttgaatgatccatgaaaagatattttgatgatgtggtactgaaggtgccccaaacccacactgcctttttggcttctctccattaccctaggaggttatagggcaaaggcataggaaggataggtttgggttcctgggaagtctgtcttctgagctgaattttacaattgagcaagttggcttgactggccatctgacaatctggaaagcttaaaaataaattgaactcagtatttagaaaaggcagctttcaatatcagaagactagcttgtgtttctcgctttccatttggcgggggaatctgtgaaggctctaatttcctttcctgagacctggcttgttgtcttcaggtgctagctggaattcaaaaggacacagactgtgcaaataaaaaactcagggaagggaaaaaggtcaacatgtgttttttgtttcagttcagtttgttactttgaagggttataatattttttccttctgttttgcaataaaactggttctgctactagactgacatatagatacctttattaggcaattatcacaagagatatgaaggctttctgtgtaagaaagtataagaggtctttcccaggactgcagttcttcccttctctccagtgccacaggacgtgatcgtatattatatacacacatattaggagttgatattgcacacaggcactggcatcatttgagaacttatggaaaatgcaagtgcttgagcaccaccccagtacctgttgaaacagcaactctaaaagtggggcctgttgatcgtgttttaataagccatccaggtgataaacatgcaggctcaagtttgaaaaccactagtatgtgttagttatcttgggcactacctgcttcaggaacccccacagaattatgggcctgaatttcatcctttcatgaggtttggggacaagtatgtgggtggagaagtcttgccatttgaaatcaaaggaacttccagattcataagccacttaaactctcagttttttcatttataaaagtgagaataattccattggcaccataaggttgttgaaatggctgatgcacaaaaggtatgtgaaaatgatttttgaactgccaggcactctctggaattagctatatggattgatgatgccaatacacattatggaccacaggcatgctgggggatgtggggagactgtgtaacctgcgtatcctgtgtcctcttctatattctgagcaccaagcccaggcagataatggccattcactgagtctttgctgagtaattttaactaatattgggtaagtgttcactcatgcatgcatcacaagcaccttgtgaggtgagtatgtgcctctttttggatgcaacctgagaggttaaggagcttcctcacatcacatagttagaaatggtatgctcaaggctcttctttaaaatggcatggtattaatacttgcatgtaacctatgcacttttcttgtgcactttaaaatcatctctggatcacttataacatctaatataatgtaaattctatgtaaacacctgttatactgtattttaaaaatgtgtattatttttaattgttatattgttatttttaattttcgttcaaatattttctatccatggttgtggacatgaaacctgcaaatacagagaagacatttatgcagccaaaaaatacatgaaaaaatgctcatcatcactggccatcagagaaatgcaaatcaaaaccactatgagataccatctcacaccagttagaatggcaatcattaaaaagtcaggaaacaacaggtgctggagaggatgtggagaaataggaacacttttacactgttggtgggactgtaaactagttcaaccattgtggaagtcagtgtggcgattcctcagggatctagaactagaaataccatttgacccagccatcccattacttatatacccaaatgattataaatcatgctgctataaagacacatgcacacgtatgtttattgcggcattattcacaatagcaaagacttggaaccaacccaaatgtccaacaatgatagactggattaagaaaatgtggcacatatacaccatggaatactatgcagccataaaaaatgatgagttcatgtcctttgtagggacatggatgaaattggaaaccatcattctcagtaaactatcgcagggacagaaaaccaaacaccgcatgttctcattcataggtgggaattgaacaatgagatcacatggtcacaggaaggggaacatcacactctggggactgttgtggggtggggggaggggggagggatagcattgggagatatacctaatgctagatgacgagttagtgggtgcagcgcaccagcatggcacatgtatacatatgtaactaacctgcacaatgtgcacatgtaccctaaaacttaaagtataataaaaaaaaaaaaaaagagatgactgtacttttgaaatgccctctgaactcaaatgatgaaacaagtgaaatcaaaaaatttgtttttcaagtaaaaaaagaaatggtttagccagcatctgaacccaggcaatctcctccagagcctgtgttctaagcacttcaccacacaacgtcacaatcagttcttcataatgatgctaaggagggtggggtgagatgacattctgggagtgcttgctctgtgccacaagctgtctcaagctctctttgtgccttaactcacaaaaaccctgtagagggaaatgatgatcatcctcttttaacaagaaaggaaatggagacttgagactggccctggtgttaggtttcttctttccaaagtacaaatttcttctattgcttctctctttgtaccgtttgtgcacccaacttgtcaatccaccaatcagtgagcatttgtgaagtgtccaaatgcccagtgtagtgcttctaaacacagaaggatgagatgacagtgtctgccctcgagatgctcaaaatcaaataggaaagaataggccagtcttcacaaaacagaaaaaaaaggctaatatacagttaagagcttgtttatgatacataaagtaatcattttccatatttagaaggttaatgggaatgaggtcatcacacaagaattctcatgggggcctgaagaaattttgtgttgctagactgagacttcaacaatttctctgagcaattatccttgaactgttgagttcagcatccctgcattgcagtttcctttaagtttgttacagttaccctgattataaggagatagtgacctgttatcctgtttttttctgtgttgttaacttcttatccctggtactgagaatagcgtctacaattcagtaggtgctcaagtttacatgtgaccaaatgtttataaaaaggagaataataatgtggtgaaagaaggacaggagtgttcagccaaattttggattggatgagaaggcagattgtcagggatatcatgacccaaacaaaggtggagagacaccagattagggaggagccaggttctccagagaggacctgagttcagaaggagcacaggagcagagcctttgttatttaggatgcaaactctcccactcccatacactgaagtgtggtgctgtcttggcagctgtgtgttgaacctctctccctaccccagagaagaaacctcatacgtacttggtgattttctttttaagttttttatttttatttatttgtttatgtatttatgtatgtatgtatgtatgtatgtatgtatttttattatactttaagttttagggtacatgtgcacaacgtgcaggttagttacatatgtatacaagtacttggtgattttcaaagttgagagaccagagtcccttgtcatcaatttcattttccttggttttacttctacttagaaaacctttggatgccaaactcaagtcttggttacgccccatgtttccttcaaaggaaactgcactagtaattgaaaacagaaattggttcatttattctaactcacaggacacaggtaagatccctgtctgtgctccaccttggctgtctcttttctaatcccgggagaaaatctggatataattctctgctttgttgattaaattcctctggtccttatgcaaaattgtgggctttcatcaaaataggattgtctgataataccctttgactcagtaattccattccttggaatttattcttataaatgatctatgagtagtagaatgttatgtgtacaaagacatttattgctgcattagttaaaatgatgataaaactagaaatagcctaaatgcctagtaataggaaaatggttacagcaacaaatgatggcatatctactcagtaaaatattctgcagttttaaaattataattatgaaaactatatagcaatatgggaaacgcttacaatgtcatgttaagtgggaaaaaatacagtactgcattaaatttaggttatggctgtagctatgccaaaataatgtatgtatctggatgagaaacagaaacaattttgaaaaatgaagataaagtgatttgctgggatatcaagattatgggtaaaaacttctctatttcagtgtctgctaaagttgttataactttatgcaattcaagggtcttggcaggctatgaaacaaggctgactgccccatctgaaactgaaagggtcacaatgcactgggtaagatgtgagcatgcaagagctatgtcctaaactgcggaagtgcacagacttctctctcaagggaaaaagccatgcatggcattccttctggcattctctagaatacctaggataaaactctgtgcaactccatgtactcaaatcctggggttagtgggtccatttagatgccttcacccatattcttcattgatattagcatcatgtgcccacaagaatcccagtaaaggtatcaacttcagagttcttcatcaccagggaattctctcactttcaaggtgttcccgagtaaggtgacctggctttgcagcttactagatgtatgatttaggtcaaggtacttaaccttgctaagcctcagctttctaaaatgtaaaatggatgtagtaataatgctgcctccatgtagatactgcacatgtgtaaataagacaagaaaagtaatatttactatagtagcttagtaggaagcactcaataaagggaagctattggtagtgtattattgcaaacgccctgatttttctaaatgtcaaggagaaacttgtgtttaatggaatagttttcaacttcatttgattatatctttgggtcttgttatagtgccttctctctcagtagctaattagtatcctctaagtttgagtcttttcaagcgttcacgcttccatggaagtgttttctgcactgtgtttaaatcacgttagagaacttaactaagcttcaagcctagtagtgtggtatgtgtagttattctgacattcagagaaatgcagaagttcaggccagatagaaggctaagagaaagagaccccttggtgatgccacagatgactaacccagatgggggagatgagaaggctggggagctaagagccacagccagacacaagagaggaatttggtttgaaaagagagtattaagacatcaacagcctggaaagagaagtacaggctgatttgtgacctgttgagcaccaagaaaaaagatgtggcaaaagaaggcacagatgttctgaaaaatgcaaagaatttgtgatggctcagagtccaactgagggaaatgactgccaaaggcagatctcagtggaccgtgggagcactggctcgatgagaagacatgaggaggctaggacttcataactgacctttaccagagtgtcttcctgacccagagcaaggaagagagatgaagaggagaagatgaacaagtcgtttgagaagaaaaataaattagcaagtctttagaagtagattaaaatattcctgaaccagcagcctgctttttactaaaattcttttttttaagtcatcttcaatggcttgaacttacagttcagttaagaggatgtgtgtagctctgtctacattctctcatcagaactcctactactcagagtcaaaagcttcacttctttccttctatccttatcatatggaagctgctacaataccttgagggtcatttcattcgtcagcctaaaggttactaaatgtagcttttatataaacaggcatccagttaacatagtggagattacaaagaccatacccagcaggaggtcagtggattttgatattctcctttttcccaaagggaagaggcttcccattggggttacaaagtagcaggtacttggctggaaggctgagaagagagaatggaggctgccctgttgaaagactgtgtatcagaaaggaatgtttaaatcctgaacttaggccctcacttctgcttgagcagagcagagctacttatgcctaagtattggcataagtgatgcctccacacagctttctcaaacccagatgtgagacaaagagagcagacagaaggcaagtgtccagggaaataaaatggcccacaagcagttatcctggcccagtgtccctgcaccaaaggagcttccccagctgtgtgtcacattaggtctcacattgcgtattctcaaggaggccaactaattctgtaaccatggataggtcctgtgataaattggaaaatgacttctggggcaacagtctctagttctcagaaaggaaattcacagaagtgagcggttggccagaaggccaaaaggccattgcctcagagtggatcccaaagcagagtgatgtggccattcacagcatgtttgagtatgtaagaaaaaagaaaaataagaaagggtatgatttctcctgccaatatcataagctgagaatatttttctttgctgaattcagtaaaataaatcagagatttttctcgatggataattacatttgttaaaaagcatttaaggaggtttgggaatctgggcatgatgttggtcccagatgaaataaagatgagaacatgatttagcttggagacaaactgtaacttaaaccacacctctctttttctttttccttattcatagttcatttcttcaattcagaaaaatagttttcatgggggaggggattgggaggagtgcaatggctaaaaaacaggctcagtgaaggccagaagattactaagaaacctcttcagttgaccttgagtttgctgcaatatccaaagatatatggcattctaaaatacaataatttaaggaaggcatttacagtttcatggtcatgtttaagcaataatatattaagaataaaagggaaagaaataatagcagcaaaatcctgcagaaagaaaagaaataatggtctgatgagtccagattttatctgaaattcctgaaataatgttatcacaccctaaatgaaccattcagcctcagtctgcatacttgcttggtattttgaaaaaaaataatataataccacaacatgcttgagcactcttcgtatagacttttaaattttactgaacttagcagtaatttattttaccaaaaaaagaggatggcatttgaaaaactatgtttaatctttatcttctgattttatattctgggcagatgttgggtaccaatggcatagatgatgtcctgtctggaagcccattcatactatcagagataacatgtagttacggctagacatttccaaggaaactatgcatctgtccacctgaaaataagtgaatatcacacagagaactcatgtagcattgacagacaccaaggaaattagtgaaagaaaacattggcctatgttaaacactaggaaataaagcaatcttgtcaacaatattaacagtcctcctggggccgaaagagtcatttgtttaccttatgaagatgcggctttgtgaagaataaaagtaaaaggccatgcccaaggattattagaaagactcttctcatactaattctcatttctgagtgcccacagaagtgagggccatctctctttccttaggactccggttttcaaaatgtagtttgattctatcacctgcttcaaatgactctctaaagggctctttgtgccctaccttgagctggcttctgcaatccatatggatgggcttgtctccttcccctaatcaagcccaactccaaattagacattttccttcatcagactcaacactgatccctgctttccttaaattcagcttatacatcttgtttacatccaaaattaaatctaaaaaagagaaaactcttggttttctcatcaaacttctcttcactactatactcccctattattagctagaaacattaatatgccatatatatatatacacattattgattacaaagtgggtcgttcatgaccatctggatatttagggtcatctttttagaaggggtgcttgatattatctagcacatttggttgtttacatgagaaactgaatctcagagaatttgggtgacttgtgcatccacacagaggatttggggctgtaatccaatgttgttttcaatataccatattgccttgtttttattccctctctgcatatggcactgtgctaggtgctatagaaacattccccaggacctctcaatccaagaacaacactgttgatacaccagcatgaaagggacatcacacacaacccaactggcactcaagtctgcaccatgcagttatttatatcatgtaacaccaaaccatctcctcccactcgccctccctccttccctctctcctgtgttcaatctgtcgctgactctggctgctcccttctctgcgacagtgccaagagctgtttctgctgctgtagaggctgtcttccaacagtttactccctgatgcaggcccggatgcctctctttaaggagcgtccacctcccaacactctccctccagacacgccagactgccctggcagccgccaccccttcacctgccatcctggccatgtcactcccacccctgggacaaggtccagatgtgccctgagcaaaaaacaggtccctgagtgaggagactaatggggtgcagggcccctgagaacagagggcaggtgccaagttacaaagaaaaaaagaaatgaaagactttagagagaaactaaaaataaagagaatgtgttttaatatccctttggctgattcatctttctgtggcaccagaaagagggcgttaccctcgactcacgaatgccttatgttttgttacaaggcctctcttcccacatctgaaagagtaaaataacaataagagtgtaagtacaggagataatgctggtggcatagctacaatctccaagctggagccagtctcagcttacagttgtgtcagtctttctaaaaaaaagaaaaaaaaatgagacagctaaggcccacgtatgcgattcctcaacatcccttcttattctttctctggcagttttcatcttattcaggcatgggtccaagatggagtagtgattaagcggcctggtgacactgtatactgggtaactgcttattcccaaagcatggctggcaggagagggagccctggttttcagtcattccagggaggaaatgaaatgctaatacctagcctaccgtaaactccacagtggcataagccttgctcaaaagtacatcagtgaataaaaagaatgtcaaaggctgtcagtagcagaagaggaaaggaaataggaaaagaagagaacagaatgagatgagacatgaagtagagagagatgagagaaatactatgctgggtgaaagtgattgggaaaccatttctgaccatgtatttcaccacactcatcccaggccttgcagcattgttttgaaataagaagcattgatattaataccaaaaagccaatgattttaaccagtggattatttgggacaaatcaaaggtaacaaggggtcaagataagcccatacgccttatttgacttgattgaaagattcattctcatagtgtctattctagattaaaactattcagaccagtctatacaacataaagtttggacattctttcaagagaacagcctttcatttactttagtgaataacaatatctagaaaggccatctgcttcgaccaaactttggaaaggatgcatttttaagattaatggaggaagaggatacctgcccaactagctatgttaaccaattcaacaccataataataattgtcaacatttatatagtttaccatataccagccattgtgcaaaacactttgcatacattctcacttaatcttcatgccagtcctgggaggtactcttatatatcctttttacatatgaggacctgaatcttagaaggttgagtcctttgccaaatgaaagcttaacagtaaagaaacagtagaatccagactgtctggttccaaaacttgtgcttttagccacttcacatattgcttctgtcattggtatgacagatgtcacaggcagatcatactcaaattctgtaatatgttctaaataatacaaacaatataactagaaaatggtagctaacttatatagcaggccccactgaaataattcaaacataaaaatgacctcttggcatttgattatctttcaccttagacgttgataaaccaaaccattcccttaggacaatatttttctgtccagcaaagcatttctcttgccaaagtataattttgttggctacatctatctcctccaagccctggaatcagacctaagctagtaaattgtgctgtcctggcaagacactcatcctccagggcattgtatcaggctaaagtaatacatcatgttgcttcccactctgtctgcccatttctccaaagagtcctaaaacagtaatgtttctgctttgaatctcttgctgttatcgcccctaggacttgcactttagcttcctggccttggaaaccaaggtgagctgaatagcattcttttcacacctgctcttgacttgggcttccaaaagaaaggaggctttcaacaaaggggcagccccatagaactctgcttcattccttttagactcagagaaacaaaaacattgacttgattgggtaacggaagactttggtcttttgggttatggggatttagtagctgagaaagagttgctgagtagtgagggtgggggcaggtcgtagagggccataattcctagaaaaagatgaccttgtccaattgagaggtagtgagaccagcaaacactggcaattaaaaattaacacaggccaaaagtgaaatcgatgcctaaatttgataggttttcaagaaaagtttatgacatgcagttcatagaaaagagaacattttctcagtgttcacttttaagatgccaaaggtcaatcttacttggaaagatccttccacagaaaagcagaaatgtacagggtctcctagcaaagtataaggcaggcaatagatatattagaaaatcttttttaaaaatcctaatttcaaaatgttttacagcagctttggtactacagtaattcacttaattccctaatatgtgtttgagtatatgtgtgtacatactcatgttattctaaacataaaaagatgtggccagttgacagtagtaaaagcttctttccatatctttactaagcacatgacaatgtataactcaataattgctttaattcaagttgtgatttcaatagacaaaaatttaaaggcaaaatattgactctcaaaaggttttcaagtaaatgcaaatcctatgaattctggaaatatcaaccattcaatgtattacattggggtcttggtaataatataatcacaattttccttatattagaaatttatgaaaggactcaagtcttccttataaagccatcagagatgtaggaaatattgggaggtgattctcccttttccacaaatgaaaatagtaattaaaatgctaaaatgaagactactttaagattattcatatcttatacaattttcctactagtatctcatgcaaaataatgcaaaccaaatgaatttatattaaataaggcggcccagggagaaaatcttgccctaaaaaactaaccgttccaagttattctaaattggcaatgtgtctggagttctgaaataaataactggtgtgaaaaacctaagtttccagattcttcagatcttaactgtaatatttggttgtgtaatcaatccttagttaatctaagtgaaatgcaggttcatttttattagctaataatttcatttgtgttttttatcagacatataattgaacattttctagaaatagcccttaaaatccaggttaattgtcttacctcttttttcctcctttcaaaaaaaaaaaaaaagggatcaactttggaacctcttcctgttagcaaatttctaaagaatagttttattccttagaactcaaagaataacaaatgtatatcttaagaactagttgcttcccaacttgaaaacgtttgcgtttttttattatttaaatactgactcttcaaatcaatgtcttccctttccaatgatagagttgaaatagttaaaataaaactttctcaagaagcaagatgggaagtttcaaaggaaattaaagctgaatgcattgttccaactgcattcccagaaatctataagaaacacaaacttatgcagcatcagtagaggaggtagtaccatttttgccagtgatgaacaaccagagtcctttgttctagaagtgatgaccccggttaaatctcagcattacacatttcccttcagagatggaggggagcgagttgcttgcatccattacaaaatgtgagactcagctaattggtgtggttttgatgatgccacagttctgcccaaaacccttgtaactagcaagtttgccctgaagattattgaattactccccgaccatgcattatttaaagggaagtgctgttattatagaagccagctgtttaaccattggaattctgtctgttggccaacttttaagatacagcagtacattgtgactaaacattatgtctagtcatggaggagtcaaagtctaggataggtggtggccaacttgtctggtaagcaatctttggtctacatgctatgaaacctttgaagcaaaactgacaaaataaatatataaatttttaatgtcaagactttgtcagcaagaaaaattatgtggaatgttatacatgcctattcattctaacagttgagtaagtgcatgaacacttcctcatgccagtacaacagaactgttggaccacaccttgctgtagaagggactataccaggcaccggtctttttttttttttttttttttttttttttcgtagcatcgagtaaggacaattaaaaagtgtttagagcatcttggggaacttcaaatagatagaaaacaacttttcaccttctaagttagaatatatttgcacctcttccttgaagtggtttccaaccatactgaatattgggcccaagccagttttctccttcatctcttcacttgttatagaatgtctggaatagaaaagaccatagcagtcatccactgtgttcaacataggaatcttctgctaggatctctgacagatgtttattacagcctttacttaactgtttcctgcaatggggagttcattacttttcattgaaatctgtcccatatgtaacacttgtaaattcaaattgttaggaatgcttttcttatattaagccaatatttgtttttcattcacctaccagctctgattctgcccactgggacagaattatacagcacctaatgaagagtttctcaaggcaaagataaaacaattagttccatctcatttaaaaattagtcgaaatgacaatagttataatttagaagtcattaaaaataactatctcaaataggaaaatgtcaaatactgaagccaattgttttattagctttctaataaattacattgtatcaggcctctacctgtagaccatagcagcaaatatctttattgtggttctggaaaaataaacaatatgtagcatttgaagatatggaacaaaactttgaccctcaactgtgatctttcaattggcgagaaatgagttttttgtttgttaaatattttgatgtagagccagaagaaatcaagcttacagggcacttcaaaagatgaattaaacttcaaaaggcaataggtaaacacttgttatattcatatattcccaatgacgtacaatgagtccattgtagacattatgagtagacaaagaaaaacatctctctaggattgtggtagctagagataattggtaattatatttatggcaaaatcgaagtctgtataccactatttcaacaatattttttaaaaaaacaaatgtagacataagataaactttctctatggaacattgcagaaaagtcctaaaattctctgtacctaaacccatcgatctacagactaaaaagcatgagctcagagtttagatgagcttagagtttgactgagtcatgtcaaattctgagctcatttaagcaaggtgataaaccagatgcctggtatttcctgttattttttttgctgtgatgatgatgactttctattttacaagaggaaatcgacatgtggtgagtttcatggttgtttacagtcaccaagaagtgaatatacaatcatagaaactctctctgccatcccaagatgaaggttaatgtcttcctcttatagcagacaaggagctccagcacctgtgggacctcagaagcagaattaagttagaggagcttgaaagggaaatactaaataggtcctggaatcccaaagcctgcccttgtctatcttcaaaggctaaccatgaattttgaaatcagttgtttctgagttggctaactttgaaagtttctggagctcttcctaccagcccacccccaaacatcaagttaccatttcataatcaacaaatgaatcccaattacatcccattaggaaatttatagtttcaacaaagggcaatcattacctgtaatgggcaaaagatacaatgatcacaaaataggccaagtcaccttttccttcctccccacccacaagagagaagccaaagggtatcagctgtgctttactggctagccacttagcaaaaagtacgtagaagtcctttgtggattacaaaggacagtgtaagcccatttgtgtctttcctctaatttatagttccaggaaaagattataaaaacaaaaaaacaaaaaaatattgtttacattgctcaggggacccgctgagacatggcttgccaggtcccagtccctcccaaatgccacagccattgggagtccacagggtctgcttcgagatctgcacagcagactctgcccagaaagaccacaaatgaaccctcactgagttactacctccagctgccctaagaatgacaataaacctgccttacagaaggaagcagccaccagggtcctgtgccaagcatcaggaaagcatttgggttcttagaggttgccatgaatgctggcccttccagcagggaggcagccaaactggtttggtagcaggccattaccatgggcctgatctcccccaatgagggagtgcaaaatacatgaggattctgactttccaaaccctatcctcaagtaatggtgtcattattacagaaacatagacttgtgatttaaaacgtaatgttttcttctgtcaggaattaagattgaatacatgtcagattaataaattggattcttctgtgcccgtgatttataaaatttcttccataaagcctgagcatccgtggagaagaccaggagagataagggaggagaagagaaagcaagtttctgtccctctgcccttgcctgagctagaacagaatcacatgaaagatggacatttcgttcactgtttcagtttggcagttactcaataagaaatagaattcattgttctggcctcttggggtggtaagagagggagccctactagattggtattgtaattagtttcaagtcccaagacttctgtacacggtcaatagtgacaatgcttcttcacaaaccacataggatcctggaaacggtactcgcagaaagctggctatgatttacttacgacttacactatatgtcaggtgctgtgctatgcattattcatacttgatttcatttaatcctcaaacaattcttacaaggaagatattattaactccattacataaatgggaaaactgaggcccagagagcttagtgacttttccagagtcatacaacagttctcctgggctcctcaatgaggcacttgggctttgcagcaagtagatctgagtttgcatcttgactccacgacttactgcatgaatgaccttcagcaagtctttgccacctctgagtctcagttttcacattagtaaaatgaggagccctttccaaacttaaaaactctttgatgttcaacctgactatatagtcaaagcagttaaacaaaaaggcaaacatgtgagctgtcctgcttataaaagcaatgcagcgttgccaacaagattaagaaaacaatgcatgatcttattttaatatttctatcatcctctgaagccaatatataagaaaagactaggattgggcatagacaagatccttgcctacaggttgcaaaacttggggagagttaccacaaatagcatggtgaatgagttagtgctaatgagtgtggtacagactccgggagacatactggcattcagaaagatacgtggggtcaggaatcattggggaagtttcaagaagaggttgagacattgcagaatatgtaggttgactagctgtggggagaggcaggagctgggtggaagactgaagaaagcagattgcaccctaacatgaggccactctgtttgatttgtgcagacaagcccacagggtatggctccagcagtcggagggcgcctcagacaggcatcgtggatgagtgctgcttccggagctgtgatctaaggaggctggagatgtattgcgcacccctcaagcctgccaagtcagctcgctctgtccgtgcccagcgccacaccgacatgcccaagacccagaaggtaagcccacctgggtgggatccagccatcctcaagtggtctctctcttgtgcatgtgggtgggccaagcagaaatcctgccccatagtctcctggcttacaagtcagaaaagctcctttgcaccaaagggatggattacatccccatctctttggtcactctgcattgcaaatttcccctcccaccgctatggacgatgtgatgattggaagatgttacaaaacagtggctaaacaaacatgggctttggtgtcagacaaaagtgaagtcctggctttctcacacaccagcttagagcccttggcaaataatgtgatgtacccaagcctcagtttcatcagtaacattgggataataataatatctaccacatcagtttgttgtcaaaattaagtagctcatgcatatactttgagatgcttttcacatgcctgcataaagtaattgttggaccatcgttaatgtctgccataattgcacttaataacaaagcttgtaacctttcaagttctgagattctacaatcttccaaagaaaataaaaggctaatgggaactattcaaaattcatattcagtagcaagcataattaaacatgaaacattaaaaatagaaatttctgtttggctataagaatgcctagacatttgtaatgatcaaaatctgcaggcatcattttctaagagctagactgtaaacaaacctcagaggtaccaactatgccatcagtagtacataaaacatctgatgcacatttagtcacttgatcgatttctcttgaatgagtgaacgaatgaacaaatgaatataagagattaaaattttagccattaagtagaaagaataagaactaaagagaaggtaaaggaggaaaaagagaaggcaaggaagttgagtaagggaagaaatagctctcgtttaagtattttggggactctgttgaaaaaagaaatgccaacatgtggttttaatctttggagctagaactaataatattgtgcaaaagcacaagatgagagatcaagaagttcaccatgacaccttcgctgcttcctggtcttaaacctcagctgaggctggaagaggaccatggtggcttattggagatgtgaccccagggagcccctctgaaggatggaaggggactgggcaagacccaacacacacagaacacagtagccactggccaggcaggaagcaaggatctcagaaaagacttttaggtgaatgtggcaggaaagcgtgcttgctggggcaaaggcagattcattctttctcttcccaggtgacccagcgcctcttggtttctaactggggagggggtaggtgtcaagagatgagtcccaaagttctggaatggtgggtcttgtgactgaggtctagacccctctccagcatgagtgctgtctcctgcatcatatggagcctgggcattctgagctcattcaaagggacaccatgggaaccacttgttctcaatgcaattatttttgtgatgtttacagtatcagcccccatctaccaacaagaacacgaagtctcagagaaggaaaggttggccaaagacacatccaggaggggaacagaaggaggggacagaagcaagtctgcagatcagaggaaagaagaaagagcagaggagggagattggaagtagaaatgctgaatgcagaggcaaaaaaggaaaatgaaggacaggaggattaaacagacagaggcaaggatgatgagagaggagcagacagcaagaatgaaaagcagaaaatacaatagaggaaatgaagaaaagtaggcctgctggagctagatgatgatgtgatggaaatagaagtaaccttttagagaatctcgctaagaaacatggagaaaacggaaaagaaaaatgtaatgccctagaaagcgcaaagaaagacagtggcaaaaatgaaaaaaaaaaataaaaattataaaagaggcaaaaaaagacacactattctctgcctctaaaacacaattaaataaaagaatttaaataaaaattaaggcttctatatgcatttttaaattttgtatgaatctgttatggaagaattgcctatgtcaatatatgttcagagttaaatattagccccaaatgctcagcaagactgaattgtgtcatagaagttcccagattcccttttcccgcaatgtcattggaggctgcatttcttagtcaagtccagggtttaggccaaagggcatccggtattgcctaaaaccctgtgaggtctgtgaggtaacttttgagaagaggtcactgcactcttcatcttttttgcactttggaatcagatataaaagatgtataagtttgctagggctgccataacaaagtatcataggctaggtagtttaaaccacagaaattgattttttcatagttctgggagttgaaagtccaaaatcaaagtatcagcccttgcaagggccttagagaaggctctgtcatgggctcctcccctcggcttgtaggtggcctccttcttctccccctgtgtcttcacttcatcttccctccatacatatctctgtgtctaaacatcctctgtgtgaaacaacaccagccaggttggatttgggcccaccccactgacctcattttaacttaattatctctgtaaagactctgtctccaaatacagtcatattttgacgtactgggagttagggcttcaacacatgaatttggacacaattcagccagtgacagaagacttctgatctctgatgataaccactgcattttgattacagctcctagaaaacactcccctccaccaccccaccacagatctatttttatatctgaaaccctgagtttctgctccatgagaaccccaggaacatactatgttagatctggaagaagcctcagaaatccccttattttgaagactaggacactgagatccagaagtgggtaaagatgtgcttgggttctaagctgctcttcttttggccaggagacaacagcacataatcaaagtgggtcaactaagaaagaattccagaaggaaaagagagggcagaaatgaagggagagaatgagagcaaaagtgctggatttccctgagggtgaagaaaagttaaatagaatcacagaattcagattttagagatcttctccttcagatcccttggtttaatcagtaggattggggtcttcatagataataaagcaaaaactctcgccatcctccaagttgtgaattagaagagctgagaaagggtacaagacggaagttctctaccaaacaaatggtgacattttggggtaagaatatgactaacccagaagtgaagcatttcatccaagtagtctattttgaagatgtcatggtataaaggaacctcctttctgcctggtcctccatgcctctgccatgctttttactccaggatcaccctttctagtggttcactgaaaacccaggattacttaaatatgatggacatgttcacggctcaatccaggaggaaaaggtcgaactgaaagcatgccaaagccccacatgggagccaagccactgctgctgtggttgcaaagtggatcctggcttatcagagcagagagaagccaggctcgtgccttagcccaagtggccagtcaccttattcaggagatactaagttctccagctaagacatccatgctttgggaccagctgcagacagaagccaattcctactacaaccatcaccttagagtagcatatagacacagatggctcttcaaaggaccacagttccatggaataactaagaattcatgtcctgtggaaaggtttgaataaactataattatacccaatcataaatttcattcaagaagaactaaagcaaaggcaaagacagagagaagaaggaaggaaggagggagggagggagggaaggaaggaaggaaggaaggaaggaaggaaggaaggaaggaaggaaggaaggaaagggaaggaagaacaaaaagactttctagttaaagaatgcttaactagcaaactatgtactataagacagttcttttcggaatgagttttatcaactctaaagcaattatcttgaatgcctacatgtgattactgaataatatgaaccaagaaaacagaaagaatctatattatctttccatttccttctttccagtatcaatacccaagcctctagtgatacatggcatataatgttggatggatggatggatggatggatggatggatggatggatggatggatgaatggatggttggatggacaaatgagtaacataggctgatgaatagtggtagaaagacacaccataaaaacaagtggcacttctgagatgaaatgattcctattctcctacacaagacagtgaggcaagtacagagtaaaaaaggaaaggcataggagctatgcttatacaagtattgtatgtttggaatttccttcgctggccaaattgaaattgttcaaggacctattgctacaggtggcaactggctaagaatttcatagtgaatattatacacctattactccccttaatgtttctttgaagtaagcagaatattaataatcatttaaaattccagtgtttcaacttcaattgtttcctagggcaaattgataattgtgtgtaaaactaattggaatatgtatggaataatcatcctgaaataaaattggtgaaaagtatttgttattgggcatctacaatgtgcaaacctctgtactaggcatgaacaagagttataagcattggagaggctaaaatatagtccttaaggctgggcacagtggctcatgcctgtaatcctagcactttgggaggccaaggcgggcagattgcctgagctcaggagttcaagaccagcctgggcaacatagcgaaaccccatctctactaaaaatacaaaaaaattacctgggcatggtggcacgcacctgtaatcccagctactcaggaggctgaggcatgagaattccttgaacctgggaggcagaggttgcagcgagccgagatcctgccgctgcatcccagcttgggtgacagagtgagactctgtctcaaaaaaaaattaaataataaataaatagtaaaatacagtcattaagagtacaaaatgtagattcagactacctgggttcaaatcttggctcttacttgcattgtggctttgggcagatcatgtaacttatgtgtgcctcagtttcctcatctgttaaataggggcaacaactgaatctaccttattcagttgttgtgagggtttattgagattgtgtgtgtgtatgtgtgtgagtgtagtgtgtgcatgtgtgtgtctgtgcaaggagtgggaggtgtatattcagagacacatattacagcacttaaaatggtatctagcacttagtaagcattattcaagttttagttaacattattttacttacctctgaaaattggagctatgtgaaaaagaagttggtctcctgaagtagaagccagtcttgtgtcaccaaaaacttcaagcccaagcttgccaacgcttttccatgatgtggtagtagagtttcaagcatgtggtaggataagagaactcaatgacctaagaaccattccaacccagagaacccctggttctatgaataattccaacttaaataggtagcttggctctcccaagtgagagccattgcttctgtttccgggtcatataatgaactttcagaaaaccaccatttttctcaaccagttaaaattaagtgtaatacgtgctttcatttcatggtgcctggggaaaatttaattgtagtatgaactccagttattggtagtcttaagtaaaattgccaaaataaatagaaatgcaggatatttctgggctcacacagcttccgggacactttagtttcttgggctgccaatccagtgcctttcacaagcatttgatcttttttcaaacatctcttgaaaacaaacaaaacctcacacagcttctaatgtgtgcactgttcgaatgtaagggtggaaaaggaggcaaagaaatgagctcccaaagagcaattccccttctctcgcctccatcccttgacgacctccctcccactaaagggaaacattgttttcttaggtaataaattctgcaatttctcaagtccattaacatccactgggcaagatgagatctattctttttatttgcccataggaaaagaatagtgcttttttgcaatattcactagataacacagagttgacttttaatccaagggcaacattgatagtctctagttaaaggggaagccttcaggagcaatgaaaagattaatagttttagatgaagcagaatccaaatccctttttatgagttttgaaatatccagtttgtatgctcacctcaatacttaaagcccagttactgattcctttggcctaagcaagacaggtcaatttttaaagagggagtagctgaggttagcaaaaattctccaggtccacaaaacttccagacctgcaaggtgaaaatcagcttttctgtcatccctaaaggcctaactggaatcagaacttttccctgatgcccacatatttggaggtccttttttaatgggactccttaatgcctttagtgccatcccattttcatccagtgtccaaaagaaatgatttaaaaatataaacgtatgtttaaattccagaagagagaaatggagattgagaacaatagggaaatgatgagagctatgggaaaagaggtttatgagtccatgtctgattcttccagagagcccctaagaaagttcttatcataccaggaactcaattataactttcattgcctattgttagatgagtaacaggagctagaaaacattttggaaattcccatctttatttttttaactaatatgattatagttttaagaaccattggtcaagaagctaactttttaaaaagtggaagtatgatggttagaaataagaatgctaaaggtgcatcaagctgattttaattctaaatgtccttggcagcaatttagaatctgtaataaactacaccaaacagttttgaggggaaggggattagtttctccccttccttcgtgtgtgtgtgtgcgcgtgtgtgtgtgtgcacctttgtgttctagcattgttgcacccattacagagctggggggaactattttccaaaattataggtgagaacagtttcttggattgtctttcagtgaaggtaaattcctctgtaaaaactaaccatcattcagtaaaaactgcaggattcctttgtcttctcaaaagcctgtttctcatcctaaattaaaaattattcaggaaatagagaggacattattggaggggtggaaataagttggttttctttttattgtatcttttgaggatccagggacttctaccatttcccatctaacatacagagaaggattctctaggtccctgtctatagactgcagtaactttcctatagaaccaatttgcaattttagaaatttctaggtctaattattgacccattacaaccaaaggtcaatgcatccagccaatcttccttctatcatcccctgcccttacttctattagggactgggattacaggcaaaacccatcaaatgcctcttctaccactttcccatttcttaaccattagcctctaacttcctctattcagtttctcatatgctttcatgcccattgggtcagataaaggaacattcatttatttgagtaggcatctgttatgatcactccggaaaaaagatgacaatgggttaccttgtcctcctgggcttctctaactgacatggtcaaaatgcccatatgaagataagatgttaagagcaagatttatgaaaagctgagtatgatggcagctcttgtctcataaaataactcgaaagttcccagtgaaagaccaagaaattttacatcaaacccaaaccggccaaatggtccaagcttccaagctgggatccatggctaaagtttctacaaaattctgggtacaatgtataaacattcacttggggctttctgtctagccagcaccaagaggtcaagtaatcaaggaccaactagccctgccatctgtgaaaatatgtgctattttcacggctttagttcacaattatggcaagacaaaagttccaaataattaggagcaagaccatggcaggttgacggttgagtaaggttctcaatcagccgacaattgtagagttggggatgtgcaatgtttatgtcatggtgtaagtatgtggcatgcttgactagcttgtgaggcactggaagactagaaggaatgaaaaatatgaatgaatcaataaatgcatagtataattactgttattttgtcagtattgttttacctaggtcactattgaatgctctgatttgtctctttataaataataatatgttttcttcttcaaaagaacactaggatgaaggtagaggtgcttttggcacaatgccacaattctgatttttttaaaactgtatgcatgcataaaatgttcttgagccattctctgccttggaatagcactggctggcattctgcatgtttacttttatatgctgaaggcccccatcaacctcaaacagaggcaaatcaatttaacttctcatagtgttattttgttcatcctaaaagttcaagagagccttccaaacttccaaaatttctctcaattcagtgaggaggaaaattcagaacacagcatttgaatgttctgcccagatttgtcacacacacaaggaatgagtgaaagagggcaacaccctttcctcctaaccctgtgaactcatcactattgcattgaaatgacaccaaaaggtaaaaaccctaggcctcacatctcccaagaacactgcaataggagttactgcatacaccagtttaagtaactctagcataaattgtatgtcagatgaaacaatggcattttggaggcttaagagaaaaagaataatcaaatccagtttttaggtactaatgtgctgaatctttagcacatagcagcaaaattgctagaatctggtgtttcactttttaaaataccacatttgaacctttcagcaattccaaaatcaactccctctgcgaaagataataagcttaaacattttttaaatttaaaaatgtaacacaaacaaacagctaagcaaacaagctgcccataaaatcaacagtctggggagccctgatcctgaagtattttacaacatccttcatgactattaaaggcaacataaacacctcttgtcagcaagggaaactacccttggcatttttttttctttgttccccaggcttttaaaccattttgatagagattttttacatcacaggcagaaatatttgaaatagagtcaggtggtagtctttaaaagagtaagaaagttgctaagtcaagataatcttggaataaagtcctctgattcctggggattcctagggatgccccagtcactagaaaacagagctgtaagtccactctcccagcactcaacggagctccggaaaccaaggagctagctactgtttccccacattcagccagagaaagggcagcactctagcatgcaaactgctttgacaatagtaacaattaaaaagtaaattaaaaagaatcataatagctgatattgattaggtacttgccctgtggcaagagctatagggaatcacctcatttaatcttcacatgaagcttgcagagtgagtaccacaattatcactattgtatagacaggaaaactcaggctgagtatggctaagtgtcttgccaacgtcttgggctaacaagcggtcaagcagaatccaaacccgagatagatagaccacagtgtgctaatcaagcactgcactctctcctgcatttcttagttgatatttaccatatacaatctgtcacttgtatgagatggcagggggttctgtgctatttgtccttgtagagaataccacaggaagaaagtaagcagccatgcaatatttgctgttgacctgaactccattccatcattcctgcaggaaattcgcatccattaaatgagcatttcctggtttgccactttgctcaaacactttgcttggatctggagaggatatagaagtgaaggaaatatgctacctgctctcaaggaacttatgttttagtggagagacaaacatgcagaatttactctacagaacatcaatgcttgagcaaatgtagacccagagagggctcttacagcacacaagccagaacagactgatggtgctaacaattaggttcaaggtttttctaaacagtagactctcctgcatacaactataccgcatgccaggtaaatgactgagggttattacatccaattataacaccactgtgatgtaggtgctcttaccccacactttcattttacagaagaggaaattgaggacagcacaatgtagtgattatcaaaggtcacacgactactgtgtgggagagctaggatttaaaccagatgcataagatgaggtcctccaagaaacagaagatgagaaggtgttaaatgagcaggggttttattagggggaattaatgtgtgaacagaaataggggaggataggcaaagccatcagattgcaaggcaagcctaaccccaagggaaggagagagagagagtagattggttggaaacatttttggtgggtctatggtctaaggaaagttcagcaaagtcatcatggagtttttgagccaaagttgggcaatacagttgcccaacaaatttctgtgtttctcagaaataggtctgcctcaatgtccccaccatacttggtcactggctcttgggaggggcctgccctgttccaatccactagagccaaagaagagccgttgtactggcagggggtgggggaattcctacaaccacataaaaagtggggtgaggtttccagaaaaaaacgtgatgctgggctaaccaaaactgtgtccagtaagtacatatccctcactctgttaaagaagcagccacataaacaaggagtacacgtttctcaaaatgtgcaccttgttctttggttttgaagtcacatcccaaagtgctgagtagatcgcatgaccctcgctttgcctggctgccagagaggaaaggctgatccaactctcctggaatttgaacttgtgattccctgaagtaaagagatatcaaagttgatactgagacatctaaatcatcctccaccatttcacatgtccccaggccaagccagcaaaattgctatagcacatccctttcaacaggtaaagggctgatatctgagccctctttccaatcatccactgctcttttcttctcattttgccctttttgggagcaggtcaatgctgagttagtactttatgctgtacaataagctgctgatattccatgctggacagaattttcccagtattttttatagagtgccaggcttttcctagacttcatgtcatacaatacttaacttgtttggagtgggtggagatggaaacatagtctattgaaaacatcactgcttcctccctgaagtttaaagagcctatttttatccttttagattctatctctcaggcaaaatctcataaagataagtggggaggaaaaaaagggggttataatacctagggagtttgcttttgctaattgaatactgtgctcctagacttctataaataccattacaaatgggtcccagcttgtggtaatactcaccctcctcattgagtcttctgtcccatggcacagcctttccctccaaactagcatctacccccatctggaagcatgggcagctcatgatattatcaactattgctattggaaagtgatttggacttgaaagcactagatattttttacctcttggggaggcagtttagcagagtggttaactggtgagctccagaatcagaaggaataggtccaaattccaaccactattacatctccatcataagaaattaggcaagttgtttatcctaagtttcagattccttaaagataaaacagtcaagacagtagtacttatccctgagagaagtataggaaacaagaaaatatatgcaatttacatacatactacaatccccagcacatgacaaatgttcaagtaatgggaactgttattattttagccctttgtctatcagtttgttcctctgtgacctcaagcacattactaaatgttagcgagcttcagcttgtacgtgggactgacaggaataacaccgcatcacctcatgtggtgattgtaaggattcagtgatattattttgtaaactgtaaagcctttgcaaatgttaagcaagattattattattgccgttgttattagtcctcagtgatcttttttttttttttttttttttttttttttttttttttttggagacagagttttactctgtcgccaaggctggaatgcagtggcacaatctcagctcactgcaacctccgcctcctgggttcaagcaattttcctgcctcagcctcctgagtagctgaaactacaggcacacgccaccacaccaggctaattttttgtatttttagtagagacggggtttcaccatgttggccaggctggtctccagctcctgacctcaagtgatctgcccacctcggcctcccaaagtgctgggattacaggtgtgagccaccacacctggcacagtaatcttaattgaaaagtctgtggatagctttccaaaggaaagcttggagcttggataagaaccaagagataatgggagaaggtgaatggcctcttcagggccttttctagcaccctaaatatgcgtgtctgtccataatgggtaatcatatatatcacaaatcaaaccctccacaaacttatttcctaatgtgtttgttaacctttccttctaaagggtaaacttctttaaccaaccccagtgagctggaggatcaatgttttcttaatagtcttaccttcgttggtgtcaataggaaacagtatttactcactactgttttccttttaaaaatctgtctagttgcatactagaaacagtttcagctggtttgtttgtattggacaagctgctgaagtgaaaagtttttgcttgactgaatgtgagacagtttcataactcttcaagaagtgcaccaaaggtgggtgccagctctgatgacggctgcttctaacatgcctccacttgccgcccattgtcaagggtggctggcgtaattaagttaagacaatgagcaaagcaacagatgcaactgagacctagtccctgagtgcttttgttttgtcactgtcattgtctgcaacaaagaagtcacatgtgacagcctgggaagagagccaaatgcaaaccagacgatatcccagctggtttgaatggcctccaccgtgcacgtgtgtgcatgggaatcatgctacttggtacagcatctgcttcactcaagtgagtttcagcccatggctttgctgtgatgctgagacagacccagaagaaacagaccagggaatccctccgctcagactttacactttataccttgtgctttgagagaaaagaaaaagaatctctctattggagacaaaaaataggatgtatgtggttggtcaatctaacctcaattctttttgctatagccccccgctaatttaaagagtgaagcatagatggtatcttaatgttttcttgtagaaatttgggattaatttggcttgagaggaagaatggagattaaacgctttatgaggctttcttttaatttgttcccatttcattcctgaatattttcttagtttgggcattgcagatgtttaaagaacttcttattttgagctggtatgcctcttaaacagaaaaacaaaaggtaaaattcaaattagtgtgtttctccgcctgttaattaatttggttagtagttaggcagagagatggcatccttaataatatctattttgcgggtttgatcagctacagaccatcaacagtgttgattgagaattgaacaaaaacatttcaaggagtttgggaacattagggatgctattctgtggccccatgtgtccttctctcatttttctagagaactcctataagaaagcagaacacggccaggcatgatggctcatgcctgtaatcccagcacttcaggaggctgaggcaggcagatcacctgaggtcaggagttcaagaccagcctggccaacatggtgaaaccctatctctattaaaaatacaaaaaattagctgggcatgatggcgcgtgcctgtaatcccagctacttgggaggctgaggcaggagaatcacttgaactgggaggcaaaggttgcagtgagcctagatcacaccactgcactccagcctgggtgacagagtgagactccaactcaaaaaaaagaaagaaagaaagaaagaaagcagaacccaatggaagattaagaacacacatttagcttacgcctgtaataccagcactttgggaggccaaggcgggtggatcacaaggtcagaagttcgagaccaacctggccaatatggtgaaaccccatctctactaaaaagtacaaaaattagccatgcatggtggcaggcgtctgtaatcccagctactacagaggctgaggcaggagaatcacttgaacccgggaggcagaggttgcagtgagctgagaacgcgccactgcactccagcctgggtgacagagcgagactccatctcaaaaaaaaaaaacaacaaaaaaaaacaaaacacaagtttactgggaacttagcagtagatgctttgcaccacaacaaatgtatcttaagtggtcttttgtgatatttgagggaaagtgccagaatttaaaacaaatggcatttcaagttattctatacaaatgcccagtttctttctaccatctttttttcctttttgcagtggtcactgagctattttagtgaatgtttttacacaatgatgccatcttccttctactcagtcagtacaagatgttgaccatcgactcataaaacactagctacctttcatgaaggacttggtgataactctcatgttccaagtagaaccggaaaacatgtgtaagaaaacctgccgatccctatgggccttggccaataggtattattcccaaggggtggcagtttatctttttccccagccttcatattaaaacctctcaccttctccaggtctcaggtctgtgtaatctcaaatgtgctttagctcctcacaatattgtaactgtgtgggtgttcattaccttagccagaagacagtttacagattccaggtctcatggagagaacttttgtttttggttatgaacctcactgtataccaataattatccattacatccttctgtagagggctctctggctagagataaaaccaaaaaaagaagtacctcaggtttatgcatataaatgccagttcctccttgattttatttcaaaactcctgtctacatactttgcaatttaaatacattcaaggataaagtaataactgtaggaaaagtattataatataatgacttagttctgcacatcacaagggggtccctcatactcattcattcatttcactcattttacagatatttattgagcacctgcaataacctgcacactgctctagacactgggactataacagtaaacagacagatacatctctggtctcacagggcttctattctaagcaaaactcaatatccaggccgggtgcagtggctcatgcctggaatgccagcactttgggagaccaaggccaggcagatcacctgagcccactagttgaagaccagcctgggcaatatagcaaaaccccgtctctacaaaaaaaaaaaaaaaaaaaaaaaaaaaattgtcaaggcatggtggcatgcgcctgtggtcccagctacttaggaggctgaggcaggaggattgtgtaagcctgggaggcagaggttgcagtgacctgagatggcaccaccacactccagcctgggcaacagagtgagaccctgtccaaaaaaaaaaaaccctcactatccttaagataacatcattgcttgttgatgagtgaatgttaacaccaaattaggaacccaggacttttagtcttggcatggttactttccaataaagatgacaatactaagaagagaaaaatgatttaataatgataatagtggctaatacttatgtagtgcttaccatgtgccaggtctattgtaagtacttttatatatattaattatttaatctttgatcctataaggtagatattattgttaccctagtttatagatgaagaaacggaaacacaagagattgccactcatacaagtttacacagccagaaaatagaaaagctacgagttgagctcagcccagtatgtctatgattttacagactcaaaattaattataagatttcctaatcttcgatttctgaaactctgccttgctctagaggaaaacaagaaaaacaatgaaaaataaatgtctcttttttacaaaaattaaaacagaacaaactgcaataaaacaacagaggatgaatccagaatgtgattgattttttttcttactaggaaaggatctagaggccagaaggctggatttttcaggatctcctttcaatcaatgaatctgtgatagaagcagatgaatcaaatctcatctttgtgtgattataaagctgtctgtggtattcacgccaccaggggtacatagaagatgcctgagtgaggtttggcaaaagtactaagggcctgtccacctatacatgcccttctcaggaaaaccaaggttcaagctctctattagctcaactggtaaggcgtaagacatggaaggttgaggcccaatgttagaaatagatggatacataaaacttcatcaagttaatgtcactttttctcctttatttataggaagtacatttgaagaacgcaagtagagggagtgcaggaaacaagaactacaggatgtaggaagaccctcctgaggagtgaagagtgacatgccaccgcaggatcctttgctctgcacgagttacctgttaaactttggaacacctaccaaaaaataagtttgataacatttaaaagatgggcgtttcccccaatgaaatacacaagtaaacattccaacattgtctttaggagtgatttgcaccttgcaaaaatggtcctggagttggtagattgctgttgatcttttatcaataatgttctatagaaaagaaaaaaaaaatatatatatatatatatcttagtccctgcctctcaagagccacaaatgcatgggtgttgtatagatccagttgcactaaattcctctctgaatcttggctgctggagccattcattcagcaaccttgtctaagtggtttatgaattgtttccttatttgcacttctttctacacaactcgggctgtttgttttacagtgtctgataatcttgttagtctatacccaccacctcccttcataacctttatatttgccgaatttggcctcctcaaaagcagcagcaagtcgtcaagaagcacaccaattctaacccacaagattccatctgtggcatttgtaccaaatataagttggatgcattttattttagacacaaagctttatttttccacatcatgcttacaaaaaagaataatgcaaatagttgcaactttgaggccaatcatttttaggcatatgttttaaacatagaaagtttcttcaactcaaaagagttccttcaaatgatgagttaatgtgcaacctaattagtaactttcctctttttattttttccatatagagcactatgtaaatttagcatatcaattatacaggatatatcaaacagtatgtaaaactctgttttttagtataatggtgctattttgtagtttgttatatgaaagagtctggccaaaacggtaatacgtgaaagcaaaacaataggggaagcctggagccaaagatgacacaaggggaagggtactgaaaacaccatccatttgggaaagaaggcaaagtccccccagttatgccttccaagaggaacttcagacacaaaagtccactgatgcaaattggactggcgagtccagagaggaaactgtggaatggaaaaagcagaaggctaggaattttagcagtcctggtttctttttctcatggaagaaatgaacatctgccagctgtgtcatggactcaccactgtgtgaccttgggcaagtcacttcacctctctgtgcctcagtttcctcatctgcaaaatgggggcaatatgtcatctacctacctcaaaggggtggtataaggtttaaaaagataaagattcagattttttttaccctgggttgctgtaagggtgcaacatcagggcgcttgagttgctgagatgcaaggaattctataaataacccattcatagcatagctagagattggtgaattgaatgctcctgacatctcagttcttgtcagtgaagctatccaaataactggccaactagttgttaaaagctaacagctcaatctcttaaaacacttttcaaaatatgtgggaagcatttgattttcaatttgattttgaattctgcatttggttttatgaatacaaagataagtgaaaagagagaaaggaaaagaaaaaggagaaaaacaaagagatttctaccagtgaaaggggaattaattactctttgttagcactcactgactcttctatgcagttactacatatctagtaaaacctcgtttaatactataaataatattctattcattttgaaaaacacaatgattccttcttttctaggcaatataaggaaagtgatccaaaatttgaaatattaaaataatatctaataaaaagtcacaaagttatcttctttaacaaactttactcttattcttagctgtatatacatttttttaaaagtttgttaaaatatgcttgactagagtttccagttgaaaggcaaaaacttccatcacaacaagaaatttcccatgcctgctcagaagggtagcccctagctctctgtgaatgtgttttatccattcaactgaaaattggtatcaagaaagtccactggttagtgtactagtccatcatagcctagaaaatgatccctatctgcagatcaagattttctcattagaacaatgaattatccagcattcagatctttctagtcaccttagaactttttggttaaaagtacccaggcttgattatttcatgcaaattctatattttacattcttggaaagtctatatgaaaaacaaaaataacatcttcagtttttctcccactgggtcacctcaaggatcagaggccaggaaaaaaaaaaaaaagactccctggatctctgaatatatgcaaaaagaaggccccatttagtggagccagcaatcctgttcagtcaacaagtattttaactctcagtccaacattatttgaattgagcacctcaagcatgcttagcaatgttctaatcactatggacagatgtaaaagaaactatacatcatttttgccctctgcctgttttccagacatacaggttctgtggaataagatactggactcctcttcccaagatggcacttctttttatttcttgtccccagtgtgtaccttttaaaattattccctctcaacaaaactttataggcagtcttctgcagacttaacgtgttttctgtcatagttagatgtgataattctaagagtgtctatgacttatttccttcacttaattctatccacagtcaaaaatcccccaaggaggaaagctgaaagatgcactgccatattatctttcttaactttttccaacacataatcctctccaactggattataaataaattgaaaataactcattataccaattcactattttattttttaatgaattaaaactagaaaacaaattgatgcaaaccctggaagtcagttgattactatatactacagcagaatgactcagatttcatagaaaggagcaaccaaaatgtcacaacccaaaactttacaagctttgcttcagaattagattgctttataattcttgaatgaggcaatttcaagatatttgtaaaagaacagtaaacattggtaagaatgagctttcaactcataggcttatttccaatttaattgaccatactggatacttaggtcaaatttctgttctctcttccccaaataatattaaagtattatttgaactttttaagatgaggcagttcccctgaaaaagttaatgcagctctccatcagaatccactcttctagggatatgaaaatctcttaacacccaccctacatacacagacacacacacacacacacacacacacacacacacacacattcaccctaaggatccaatggaatactgaaaagaaatcacttccttgaaaattttattaaaaaacaaacaaacaaacaaaaagcctgtccacccttgagaatccttcctctccttggaacgtcaatgtttgtgtagatgaaaccatctcatgctctgtggctccagggtttctgttactattttatgcacttgggagaaggcttagaataaaagatgtagcacattttgctttcccatttattgtttggccagctatgccaatgtggtgctattgtttctttaagaaagtacttgactaaaaaaaaaagaaaaaaagaaaaaaaagaaagcatagacatatttttttaaagtataaaaacaacaattctatagatagatggcttaataaaatagcattaggtctatctagccaccaccacctttcaactttttatcactcacaagtagtgtactgttcaccaaattgtgaatttgggggtgcaggggcaggagttggaaattttttaaagttagaaggctccattgttttgttggctctcaaacttagcaaaattagcaatatattatccaatcttctgaacttgatcaagagcatggagaataaacgcgggaaaaaagatcttataggcaaatagaagaatttaaaagataagtaagttccttattgatttttgtgcactctgctctaaaacagatattcagcaagtggagaaaataagaacaaagagaaaaaatacatagatttacctgcaaaaaatagcttctgccaaatcccccttgggtattctttggcatttactggtttatagaagacattctcccttcacccagacatctcaaagagcagtagctctcatgaaaagcaatcactgatctcatttgggaaatgttggaaagtatttccttatgagatgggggttatctactgataaagaaagaatttatgagaaattgttgaaagagatggctaacaatctgtgaagattttttgtttcttgtttttgttttttttttttttttactttatacagtctttatgaatttcttaatgttcaaaatgacttggttcttttcttctttttttatatcagaatgaggaataataagttaaacccacatagactctttaaaactataggctagatagaaatgtatgtttgacttgttgaagctataatcagactatttaaaatgttttgctatttttaatcttaaaagattgtgctaatttattagagcagaacctgtttggctctcctcagaagaaagaatctttccattcaaatcacatggctttccaccaatattttcaaaagataaatctgatttatgcaatggcatcatttattttaaaacagaagaattgtgaaagtttatgcccctcccttgcaaagaccataaagtccagatctggtaggggggcaacaacaaaaggaaaatgttgttgattcttggttttggattttgttttgttttcaatgctagtgtttaatcctgtagtacatatttgcttattgctattttaatattttataagaccttcctgttaggtattagaaagtgatacatagatatcttttttgtgtaatttctatttaaaaaagagagaagactgtcagaagctttaagtgcatatggtacaggataaagatatcaatttaaataaccaattcctatctggaacaatgcttttgttttttaaagaaacctctcacagataagacagaggcccaggggatttttgaagctgtctttattctgcccccatcccaacccagcccttattattttagtatctgcctcagaattttatagagggctgaccaagctgaaactctagaattaaaggaacctcactgaaaacatatatttcacgtgttccctctttttttttttcctttttgtgagatggggtctcgcactgtcccccaggctggagtgcagtggcatgatctcggctcactgcaacctccacctcctgggtttaagcgattctcctgcctcagcctcctgagtagctgggattacaggcacccaccactatgcccggctaattttttggatttttaatagagacggggttttaccatgttggccaggttggtctcaaactcctgaccttgtgatttgcccgcctcagcctcccaaattgctgggattacaggcatgagccaccacaccctgcccatgtgttccctcttaatgtatgattacatggatcttaaacatgatccttctctcctcattcttcaactatctttgatggggtctttcaaggggaaaaaaatccaagcttttttaaagtaaaaaaaaaaaaagagaggacacaaaaccaaatgttactgctcaactgaaatatgagttaagatggagacagagtttctcctaataaccggagctgaattacctttcactttcaaaaacatgaccttccacaatccttagaatctgcctttttttatattactgaggcctaaaagtaaacattactcattttattttgcccaaaatgcactgatgtaaagtaggaaaaataaaaacagagctctaaaatccctttcaagccacccattgaccccactcaccaactcatagcaaagtcacttctgttaatcccttaatctgattttgtttggatatttatcttgtacccgctgctaaacacactgcaggagggactctgaaacctcaagctgtctacttacatcttttatctgtgtctgtgtatcatgaaaatgtctattcaaaatatcaaaacctttcaaatatcacgcagcttatattcagtttacataaaggccccaaataccatgtcagatctttttggtaaaagagttaatgaactatgagaattgggattacatcatgtattttgcctcatgtatttttatcacacttataggccaagtgtgataaataaacttacagacactgaattaatttcccctgctactttgaaaccagaaaataatgactggccattcgttacatctgtcttagttgaaaagcatattttttattaaattaattctgattgtatttgaaattattattcaattcacttatggcagaggaatatcaatcctaatgacttctaaaaatgtaactaattgaatcattatcttacatttactgtttaataagcatattttgaaaatgtatggctagagtgtcataataaaatggtatatctttctttagtaattacattaaaattagtcatgtttgattaattagttc

SEQ ID NO: 125 - DNA, 97731 bp, Homo sapiens
aattcgccaactgaaaaagtgggaaaggatgtctggaggcgaggcgtcccattacagaggaaggagctcgctatataagccagccaaagttggctgcaccggccacagcctgcctactgtcacccgcctctcccgcgcgcagatacacgcccccgcctccgtgggcacaaaggcagcgctgctggggaactcgggggaacgcgcacgtgggaaccgccgcagctccacactccaggtacttcttccaaggacctaggtctctcgcccatcggaaaggtaagtctgttttgccctcatcactagagatccttatgatgtaaggattgcattcctggtaccaaatgagttgtgattttatattataattacaaaacatatggggtttttttttccaccgctggaaaaaaaaggagtgtgtattggttatatcagatgcaccttgacttttctggtcttgtaattttgtttgttttaactttatgaatagtcagacttggaaggaacttttcgtaaagttgttatcttctgctgttctgcagaggaaaagtaaaaattttctcttcaactgctctcctacttctagtctggctgattcacctgtatatatcttttattttgagggttagggcagtagagttttaaggcagactttgctcatagcctgcccctgggatgggttagagggagtttgatagaggagtgcagggagaatataaaagtttatatctaaacagcacttacataaagtttacaaagagttttgtacccattccctcatttggtcctcaaaatattcaccctggaaatgagagctgggggacagaagagaggaggtggctcctgggccagatgaataactgacaggcagctagagagtggtggagaacagctttactggggtgcctagagccagcagcgtcccacatgtctctagaatcacctcctcctcctcacctctcatcacagaaagatctgagcaacaacatcccccaggtatgggaaccctgctgcccctggtgtactttggaaagaacacaggggttcttctcacccatcagtgttgtaagaggaataagagcttaggtttgaagccagaggtgtttggtattctccccaccaccatacatatgaccctgagaaagatacatcacttccttaatcctcagttttcacatctctaaaatggggacaatagcgtctgctgtcgttttgaggagaaaatgaggtatagaaagatcagcaatgactgcttaataactggaagtttggataatcattgtcattgccaaaaactgccatcactctggaagttaaaagaggcattgagccagtcttggattgtttcttgtgtgttgttcctcagcccgcccccagcccccgctttttatctcacccaatctgagggtgtctcactaggctggcaggtctgagacttggctgtattttacaagcaggaggttgtgttggcacaggttggagaaaaggtagtagcccggggctggaagttaatgtcaaattttgattccagaatgtcaggaggttttgagtttaggcatctgcagattctaaagctgacagctatgaagtacgatgctgttggaaactctttggaaaagctttctgtccggagggagggcaggacagggagcaccacttgaagaatgaatgcctctttttcatgtttttgtagactttttcccccatttttacagagctttcccatatgtgttttagaaaggaaaactactatccatcccagccaggcaagcccaattcaggactgaagaagatttattcagtcctagacaaccaagtgaagagtttctggctttgtgcgcatacaagtcatttgcaggagatgtaagtcagcgtgctttggcccttgcatttcaggaaggtgactgctttgtggggaagaaaaaggtgcacaatatgagtattctctggtttgctcaaacagggtaaattggacaaggattgaaagggatgttgccaagctctacagtcattaaatatttttttcctctatgctttgttttaaaaacctagcttctctattttatcccacactaacctcctccttccccactctaagaagtgactaacgtttcagccctcaactttgtcattcatataatggagatgacaaactatgtctcacagggctcttgcaacattcaaatgaggtaatatatggcaaacacttggcatagtaccttccacatattaagggttcaataaatggaaacttttcttagtttctctgtttatcattttacaaggacttgtccaagattaatattctaagatcatgatttttaaacttatttttaatgatgaaaatattcattacatgaatttagggcaaacccccagtatatgacaggtaaatgcagggctgctttggttgaagtggggtcacaaggtctaaaacttacacctttgctcttagcctctgggacattgccacagaatcttcaatgacaaaaagcacatttacaaatcatgaaaccaggctgtgtgcattctggttgccattctgcccttcaacaaggatttttgcccctctgagtcaccatctgtagcagaagtaagagcaagtccacaaatagtgtaatagacaggaatatgaatgagaaataaaagacttaacaaaggctattttaattaattctaatgacaatgatagccaaaatatatgatgagcctactctctaaactgtaggcttttgtgggatcatccacagcatgtctctgaggtatggactatatttgttggacaaagagatggcttcaagaacagggagactgaataactttaccaaggtcctagaactcagagtgatacagccaggtttcacacccaggtccccgtgatcaccaagtcagaggtacattctgccgtgttccttctgaatgcttctctgcttcttgcctgcctttagaaggaaaacacttcctttctgactaaatatgcccctccaggcagactgtggccacccataaatacagcagtagcctgatcatataaccagaatggaatttggaaagagaattcaagctgacagaatgaaaaacatatcccccttaatcctaccctttctaatgctaacaataaattaagagcacatattctctcctctctctctagatttctatagacacctagctgtgctttcttacaagaaaacatatccactggaccaaagcgcagcccccttcatgctgaagccacttcagtttgaaacgtaaaaagtaggttgcaaacatttagttggctcgaaatatatgtccttttgtgatggtaaaacacacaaacacaaagttaatagtgtcacatatgtaataggagggtttgccaatggtttctcatctcattctcactcagacactacaaattataaattactagctcaattttaaagaaatcgacactcaaggaagttaggtgactcatctgaggtctttccgtaattgaggggcagagctggctttgacccaagctttctaactaataccccactgttctttctgctgtgctatattgccttctgaagtcaggctgtgctgaccaagtttagaaccttaaatggtgtctttcagtgaatgatcaagatggtggagaagcccccagctggcattggtgcctattgattttacagaatagccctgcatgtatcatttttcatggttctcagcaaaggtcagctctcaatggtgcaactctctgcctggaaacaggaaagttcaaatttcagccctggaagagagaagaatgaaactagaggtagcagtcaggtcactcctgctgattttcatctcagaaaagtaggcacacaggtgagccaaacatctggttttaaaagggctgattggtaggtaaagtgaaatcggccttggggccatgaatcccaggacagcttggaaatggttgtaggctccgagccacaaattgagccacaaattcagcggaagcctcagagaggaagattatgattcaaatacctctcactctgagaagattgtagggaatccccttgaatcttatcccgggccagtttgaacaccttcaacatgtgggaaacattagatgaaggctcccttccaaggaggaaaacccccctcaaagtgtgacatgaccagcctcctgcaaaccccaggccataattccattcaatgtaaaagacagagatggtgaacttacctaccttcgggggctatacatgctttgtgacttctctgtaaaggagaaaagtctgcaaaccaacctgattctaatcctggtggccagacatttttcagttatgcccttaagcctaaactcctttccctccaccttgtctcacatttccagcttctcttccactttagaaacaaccctgtcactatcattactctctttggcccttcatcatggaataaaagcaaaatgcccaagtcaaaagcagatcgcgaacggaaaatcccttccatgtgcatttttagtctatctgtgaatggagattttaaaaatatgtatttcatgccacgtcgtctcagaattttgaagtttcctgaagttcataggtccttcatgatatagccatggtaacttaaatagctttgtttggtcctttaaccctcctcaaataccctataccaagagccagagatatatcatgagttctgaacatagatagctttgcttcagaattgaccgttgttcacctctaaccctaaagctggctgctgctaacttcgacaagaatgtgtctgaaatgttctcctaggagaatcctaggggataatcgtaatagctaatatttactgaggactctataggcatcatgccatttagtcaaccatagcttctagtaagtcttatcacccaccctattcaaatatgcacaatgtaaggctgaaaacgtttaagtagcttacccaataccatgcagaaagtacttggtggagttaaaaatcaaacccagttcccagtcctgagaggctagttataaccatttcagtaaggaagtcatgctcagctccctaattctattcatcttctgacaagagagagggctagacacagcaaagctaagaaagacacaaaagcttgtctttttggccctggtgttctttgacagactggttaattttgctatctccagcttgctccttcaggcttcacctcttgaaaaaaactgtaattaaatgattagcatgtgacccataatgtaatacgttttctctactagactttaagctacatgagggcaaagcccgatccacatcacatccctgcaaccagcctgagacctgaagcatagacacacataagcaagtgctgcccaagggaagccatgagtgccctgcaggctgcctggaatccccctgctccaggttccaactgagctctgcacgtcccccactgtctgtgtcataattacccctatgattgccttccctgccacactggactgtacaccactgaggtcaagaatgttagggaggcgggagctttgtctgctggagttcattttccccaaaaacggacccaccatgggcagacgcaccattagcacagtccccaaaggagatgcccaggactgtgggatggtcttgtgaaggtcgatgcacagatattgcagaggaatgctttaacttctaggtaggttactattttcttaaatctccttagggaatacagaattttcaaactaaaagggcttacgggcagcctctaagccagaatcttgcagactggattttaaaaagaatttaaaaagatttgggggctgctgtggagagacagggaggccaagcaggggattcccctcaaccttatttcaatgaaagcccctccacttatctattttgtacactgagcctcctcatgaaattttatttgatgaaagggctctgtgcagaaaaaacagaatgtttttgtaaattgctggcctaggttagcatacctcattttaaagagggtgaaactgagacatagagaagggaaagatctttctaagatcttccgccagttggcaacagggtcaggttggaatcctaggtcttctgactcttgctcttggaagccagggacaatcttaaaagtttcagaattaagacattcttttagaaaagaaaaatgagcagagtcttattctctcaacagccttaactcacacggaccgagccaaggatgactagtatctccgtattcattatctattactgcataccaaattactttaaatcaacactcatttattatctcatggtttctagaggtctaagcacagcttagttggattttctgcctcatggtctctcatgaggttattgtctgtgttggacagggttgatgtctcatctaaaggctgaattgggggatgattagcttccaagcttgttgatgtggttgttggctggactccatttcttgagagatattgaactgagggcctcagttccttcaaagctgttggtccaaggctaccctcagttccttgccacatgggcttctccaacaaggccatttacattaacaaagccaatgagaaagagagttaccgggcatggtcgctcacacctcttaatcccagcactttgggagcccgaggcgggtggatcacttgaggttaggagttcgagaccagcctggccaatatgctgaaaccccgtatctactaaaaatacaaaaaaattagcctggcatggtggtgggcacctgtaatcccagctactcaggaagctgaagcaggagaatcacttgaacttgggagtcgtaggttgcagtgagccaagatcgagccattccactccagcctgtgcaacaagagcgagattccatctcaaaaaaaaaaaaaaaaaaaaaaaaaagagagagagagagaaagtctataagcaagaggcacatcacaatcctgtgtaacctaatcatggaagggatattccatcaccttagtcatattctgtttgttagaagaaagtcactgggccatcccacactcaaggggaggtaattgcacacgtatgagaatgccgggaggcagtatcaatggggccaccttagagtctgcctgccacagcctccagcactccagtgtcaccaatttctggcaacctcttatcaatgacaagttcactcaacccttcagtaccctcactgatgagtaataaaaaaattgatcgagaccatggtgaaaccccgtctctactaaaaatacaaaaaattagctgggtgtggtggcgggcacctgtagtcccagctactcaggaggctgaggcaggagactggcgtgaacctgggaggcggagcttgcagttagccgagatcacaccactgcactccagcctgggcaacacagtgagactctgtctcaaaaaaaaaaaaaaaaaaattctggcagccactaaagtggactagtttttatttaacatcctcccatgtatatagtggagccaagtgttttgattagttgttttaactcattggttagccataatttctcttgaatttcaccccagggaggggcctttcacggcaatgattccaaatgtattttattctaaagcaagacagtcagtgtgaccaaaactaaaactcatccattgttcctccctcaatctattcctctcagcagatataatgaatagtaacatcttcgattaattcttttttctttactaaccccacacacaaaatgttgtagtctctactgccttgacaagcaaatctgttcactgcctccccactttcttgatcaccaccccctgccccacctccattacccctgtagttcagatcttagcatctcacagatgggccactgcaacagctttcccactggcccccagcaacccagccttccccttcttcaacctgagacatagaggttaacattcctgggcctcaagatttccaaatgcttttcttctgcctgcaaaaaagtccagatattctgacattcaagattctccatgatcttgcttctggtctctaaacagatcctgtacttcagctgtcattcatactgttcacatcaacccttttattctttttatatccttgtaaatgccattccctcgtgcctagaatatccttttttatgtttttcacctattcatatttttctctcaaaattcagttcaggcaccacttcctccaggtaaattagatgcccttttactgtcatctcattctacctatgtttctttttttaaatctatcatctcctttatcatcctggaatggcctgtctgcccctcttgacaatatagttcctaaaagaaaaaattgtatctggtttatctgaaacctagcacaactggaataaagttaatctttagcaattaataggagtccttgctgtgtcccagatttggacatcctcttccttagcagtttgctcagaaagcccagagcttgaagttgttttcacgcttcacccactggcttgcaagtatgcagtgtgatgacacaacatgtgataggaggaaaccatcccagccctaggacaggaaactgtctcaggacacagacctcaaggaatgtgtttgctttcagaggtggccttcaggataaaaacacaaattgctttggatttggaaaaaccagtaccaaggacagaggagtcctgtctggggatttgaggctgagtcacaagagatagctgaaaatctggaggttataacaaagattagtcaacaactaataggaggaaagaacaggctcaagggtgggatggagacaaagagctctctatcttaggacatggagaagctcacagcccacaagaagaaatgaataatggttaagagtatgactttggcataagaatcctctgggtttgagaggtatttgcttgctatgtgatcttggccaagttacttagcttctttaagctaatttcttcttatccatattaaaagcaaagtagtagcacctagtttaaagtttattgtgatgattaaatgatgtagttcatgaacactgcttagcacagaaactggcattcaatataaatgttttgttgttgtcattgttttgttacctgttgatcaaatagttcttgatgataagatcccactagagaagcagttcccaaaagtgtgtcatgtggaaaagcattctcatgggaatcacctaaaaaagggttttgtggccaaatgagtttgggaaacacttggtactcttctgttcttggaaatgcacagctcatatgtccattcaatacatagttttagggctggtgatacaatagaaagcaatacagtcaagatccttttattcatggtgtttacattatggtggcatatcttagtttgtacaagctgctacaacaaaataccataaactgagtgacttacaaacaacagaaattactttctcacagttctggaggctgggaagtccaagatcaagatggcaccttatatgtcctcacatggcagaagacataaggcagctctatggggtctcttttaataagggcacaaattctatttatgaagcctctgccctcatgatctaagtacctcccaaagactctgccaactaatattgtcacactggtgattatgttccaatgtgtggattttgagggaacacaaacattcagaccatagcagggggaaggcagacaataaaaaggaatcacataaacttatagcacaatttcaggtagtgatatttgctaagaagaaagacaaaacaaggtaagggcataaacaatgactggtggtgagaggagtgctcttttagatggggtgagaggtgaatgtgccattgtgcagatgtctgaatgaaatgagagaaggagctctgtaggcaatggctaggagtttgaatttcattctgagtgtggttagaagccaatggatggttcagggaagtagagtgcatcatctgagatatcttgctgtaattaatctgttcaactttcgttagcccagtatctccaaacatacctgaccataggacatctacctaaaaacatcttgcaacgtagtctgggaaattcttcactggagcacaaggcttcatagattttaaagggactgcaaatttgctcttgttcatctagatctgcactaaaaatccaaacatactgcttgggacaaaataggcatgcccaggaaggaaaacctagctctagaggtagagacaagcaggatgtcatcctaattagcagctctttttggcaaagacaatcaatgagcacagccaggcctcagcagattctggaagcccatttgatgccaacggaaactcgccaatatctacccaaggctaataagtgtttgcaaacagtacaccttggcttaagtattctccaaaaaggaagtacataaaacttgagatccagccagaggttctgggagaaaaacagaggtcaaatattttggtgcttacatgtgcacagccaccaaagagctgctgaaggtctaggaaatggaaagtgagttcatccacttgaatgctgatctctttctttatggagcagtaaaaatttaagtttttaccttatctgaactaagaaaattcctttaggagtcagcccagtgtagctcaatgtagttgaaagcagacattttagaaccacaaataaatcaggattcaaaagctggctctgcctcttaagccagtcatggaaactccctgagtctcaaattaattttcaaataagcataataatacctaactcaccaggttgtcatgacaaatgacaagataaatgatagcatgaataaaaagcatttagtgtaagatttggcataaaaatgtatataataggcactcaacaaaatgttagtttccttattgttcaattcaatctgtatttagtttcataatagaagctgtcatttattgaataactactatattccagcagaggttagcaaaccatagggtggcagcctatttttgtaaataaagttttattggaacacagccatgctcatttgtttgtgtattatctatagctgctgcctctacaatagcagagttgaatagttgtgactgaaatcatctaactgcaaagctttacatattttctatttggtcatttaaggaaatgtttactgatcccttccagtcaaccttactaaatttttatacttactttccagtcaccttaacctaacaaggtggatattatcatacttgtgtatatagagattgaagcagaaaaaaaaaatcatctagtaagttcccctccaaaaacataatgccaaactctatacctaaaagaagttcagaataatgattaaaagttattcatttgtatgattcatcttcatttgcctctgccttcctctgactagtatttctctctggctaatttcttgaatttcctgccatatgctgaattaaatgatcctatttagaaggaattttccctcctttccttacttatacaaataagttgtttgttcatagaagtccatgctttcaaaactgaaagtggtaatttccagcccctctgaaacgctctctgatcttgactgatttcttggaaaccacacgttttttagatagtacatagtgtgaagcccagttttccagaaatgatagatttttagctcccccatctgctacttctcactgtatcttcctctcacttattaaccttctcttcaggtcagactcaaggagagcaggcttttctccaggggctttaaagatttgcctaagacacagatattatagtccacctggcctatgccctcccctcaagttcacaacagtaaataaaatagttatgtaaaccccaattcccaaacaccatcctaccttgttccattttgcaaatccaacaactctattcatattaatgatattgtgtttctctctgatagttagtagataaatattaattctttaacttgaacaatgaatcttacttcaaaggtaacttgatatagcagaaagagcatagactttggaattataagactgttcttaattctgattcaaataattgctgactaggccacttacttaaccttcttaagccttcagttctcttaccagtaaaatacaaacaatgctccctaattcccagagttggtaacatgattaaacagcatttgtaaagtgccacgcacagtataaatattgacctacttgcttcactcttagtttaaattgctcaagatcctctaacatagagcttcacattttatcccagagaggtcatagttaggtatatctctacttccttctaatacaggaagaaatgaaaggagtaagggtctaggatttgttctctatcagttcttcccccatcgtgtgccatccaacctaatcctgtgactcacttcaaacagaataatcaagtagatttgggaaacactctataaactgtccccttcttcgagatttccaacgagcatgaacctattaaacaccctggaaaaacctgaagtaaagaaagttgtgtaatttgtttggcttaaaatcatatttggtttaaaataacattttccaaacgtgtttaattaggaaatctttttccctcagattagtacctatcaacgtgttgtagattacactttagaaaatgctgtttaaagttacacagctaagttaaagccaagttaagggggttagacatatctctatttttcagatttttctgcagtttttcctgtcctgcctgtagatcataaagatatttcattaccagtagtttctctggaccccgaccttagttatgcaaaccaccctttaacataattaaaacaagtgaatcagttcacctgatttaaatttctgttccccgtttctagctatgtgatcttgagctgtgtgagcctcagttttctcctccataaactgtgaaaaataaagacaactacctcagaagtcttggggaggattcaatgagataatccacagaagacacaaaaagcagtgtctggcacagacgacatatgcaatcaatgttcattattattatagcatttagatggtcccattttgggaaagggaaaatagacaatgaaagtatgtttgctttgcctgaggtcacacaaattaattacgggagtagtcttagttttccctgagagtctggtttcctgcttccagtcctagagacgtatttttgtttcatgagtcatattctatcaaaatgtatgagactttattgaacttgatttaaacaggattttgtaattgtcaatggctccatctggctccttctgatgcaaatcccactcaagcaggattccattcatttgaatattagcacattggatcgggaaagatttccaaagctgtctagttttgctatgccaaatatttggtgtacacgtcaacactctccactcctgtacccatggtggatattgctaatccatcacagcaccttttcccgaaagcctaatcatagccacagaatctttctcaaggcagttccaggtagctatgtcagctctttgagttgaaacataattgatcccaaaccaattctacttcttaaccagtgcttgaaccacctctacactattactcttttattttttaatatgcccaatgtcatggagctctctcataaagggagacaggaaaaggaaagaagaggagaagatatactaacatatgtgtaacgtttattattaatatgtcaggcacttatagctttgttgtcccattcactgcctcaaacaaccctggagagattttatagttgaataagccacaattcagaaggtataggacgttgtccaaggctccccagcagataagtagaaattggtcttaagtcttcctgactctaaaggcaatgcccctgtctctcccatcacaatgccttcttaaaatttttcagggtctttcgggactaaatttctgactttgggtggctgataacagtttcacaaaggcaaccatctcacagacccctattcagaagttctcttatttagggttgtgttgtaagtctgtctgtaatcggttcttcctagataaatctcttccatttcttaaccttggctcaagactttgagaactcactattcaatgcttctgaaagagccaactagatttcttaaaattctggatgaagaccaaaatagaagaggtcattgttccattgggaaatgaattcaaatttatttttgaaataattttccagaattttacaggaatctatattgttgccacttgtccagaaccactttttattttcttttctgtctaggcaagaaatagaagagagaaagcaagtgctctgcagttttatttcaaaaattgaaaccagaccacaccagggcagtttgtggtctgaatgtatcaatggatctagtcatatttcatctgagcatttcttaggtatactaaaccacaaatatgaatctcattattgtgtctggatggaaatattttatggattaagatttgtggatttaatttggttggtaatggaacttctgttcaaggggcaggagggaggaagtcgtgaggcaccaccaatgcttaagccaaactatggaaagaaacactatttggagggtttgtacttaatgttggccagttgacttgggtctaaagtgaaattcaaaattaagttcaacaaaaatattgtgaaattagcaatggaccacagatcactggaaccaaagggatcttagaattggaaaccatacacagttgctcattttacaagagaaactgagacctcaagagtggatgcgacttgcccaaggtcacacaatgaccctgttggtcagacctgcttggcagaagaggagctcagagcttctcctccagatcttccatttattgcacttcctgttatatggcctcataagaggccaagtatctgggaacttaaaaaaaagtaatgaaggtaaaaatttaaaatgagaaagggagacctatatttaacaacagtacaacaaaatgataaatactgcaatgaaattgaaagggttactaactaataacccaggatgcttccttcacaccaaaaccaaattttcatgctgagtgcatcttaggcctggccaattccaccttctgccaaaggagtttacttgatcatagagaaatcttgtctcaaagtagaaagtactgagctcttaaaagcccttgggttgatgtctagaatctcatgggaaggagctaggtctgtctttgtcacttttgtaccttctgcacttagtgtggtgtctggaacgtagtaaatactcactgaataactgaatgaattaaaacgaactaattacagaactgaggctgtgacaaattccttgatacatcttactgtagaagagattacaggagagctaattacattagggccatcaggaaagtaagagtatttgttcattcattaattccacaatataagaacctgctatgtgtaagttcaaaccaagaaatacattcagcttcatttcatttaatataaacatattgtgcatttactatgttctagataaagtgttttgtgttgtgcattcagagatgaatgtctcagatatatccctgccctcatagagcttatagtctacatacaatctaactgcacatatgcaaaccaactgtttatagactaatataaatacaatctagaattagctaatttcctaagagaaggagttatgcatgcataataaagccattccaaatctttttttaaatgataaatcaaataatatcatatcaattccccagacaattcagaagagagaaagataaatttaggccaaagttacctgataaacctttcaatagtagatttctttaagcagcatcttgaaggactgatagatttattcatgcagagatggcaaaaaggcttctagaagccttcaaggcatctggaaccctcgctgaatgatcactgagaaatggaagcatcccaaatgtatctgtcagcttgcttcatctccacagcagccacaggctgtctggcatcttaatggtctacttctggaggattgatagtattctgctttgagccaggtgttgggaagttatatagtcagaggttggggctggtcttgactcatagctcctttgcttggccctccagcacaaaaggctgtataaaatcatggttcagagccctgactttggactcagatgggatttggttcaaatcctgactccataacttaataatgtctgaacttgcacaagccatgtaaagactctatgcctcagttttttcagctgcaaaatgagggtacaaatactatctcataattgtatgtgaatttgaaattggaaatgtaaaatgctaactaagcacaggctctggcaaaatcaacacttaataaattatagttaatgatatctgtattacttatgatggtgatgatgatgatgtcaacttcctgattattattattatgtcaacttcttaatgatcttccaaggccttttcaaccactatttggtgattgtaattctttccttttctaggaagccccccatgaacttcccagtgcaaagtgtcacataattatctcattcaggctggcattaataccagaccttgcttgtgtatgatattctagtttctgagatctctaggaacaaaaaatagctccttacttggcctattttccaaagtacccagcacattgggaggtccatactaagtaaatagcatttcgctcttgaaagaatgttaacatttatactcttgctattggcttgggagagtgcaccatgttcccaacctgcagtggcacttaagaatatcacaaatactaaatcaactgtacatggagttaaaatcaattgcggccaggtgcagtggctcacgcctgtaaccctagcattttgggaggcagaggtgggcagatcacctgaggtcaggagttcgagaccagcctggtcaacatgatgaaatcctgtctctactaaaaatacaaaaagttagctgagcgtggtggtgggcacctgtaatcacagctactcaggaggctgagacaagagaatcgcttgaacctggaaggtagaagttgcaatgagctgagatcgcaccactgcactccagcctgggcaacagagcgagacttcatctcaaaaaataaataaattgtattttgtgactctttgggaggaaattatgagctttgcgattatacagaacatgtttatcttctttggtgttgtatcgtttatacttaactcagggcttggcacgtatgtactgaaaaagtagatagttggatgaattgatggatagatagacagaaaagtaaaaaactcatcagggccaagaagtctagaaatactttaacacaaatgctctccaggatcccaccactgatatttctctctggagatcattacaatgacctcagactaagaattactgaaagactttcatatgcatttttaaaggtttttttcccccagctttattgaggtataattgacaaattaaaattaaaattttatacatttaaggtatacaacgtgataatttaatatatgtatacattgtgatatgattactagattcaagctaattaacacatccatcgctttacatagttacctctgtgtgtcaatgataaagacacttaaggtctactactatcttagcaaatttgaagtatacaatgcattattattaactgtagtcaccatgccgtacatatgcactcctttttgaaggcctcccaatggtctagaggaagagatagatcttaatcgaattccttgacccaaaggcaaaatctctggattttaatatcagctttaggagttaattagtaaagtcaccactgattagctagtgactctgggtgtttcaattcagttattctcttaaataactaggtattatggcaaataagtttcatgtgatatactacctctatttatatactacttaattggctgcctgaagtgatgatttagaatgattcttaagtggggctcctcagaattgtgttgttatcgattagctgtgtctgccccatgcactagaatgaagtgttttgtgccacagacttgccatgcctataccaaatgatcttctacagttgcttctaagtcctgctcaagcatgattttgatcctataatttgatgtctgtctgtgtctttggaaagtactgagaagctgggccaaatgtttcccgttaggaacacagtcttgaaagactaaaccacaggcagtctattcagtagaaagccctggctcagcagcatggacagccatcccaacagcagcactgcccctgaggaaccttggccagggtcctgacctcccagaaaagagccccacaccaggctaattcatttgcttttcttgctactgagttagaagagataggataacaggaaaaccagggctgtagccacagcctcctcattttcctaaaaattttagagtgtccctgctacttgacaaattgaaatactaagatttatacatttccatggaaaaagcaacagtgggaaagagagggcttcccagatttgtcttatagatctcatccttcagagactagccttctgttagaaatgctgtctccaagcacaagacagaataatcatataataccaatacacaccagttgctaaggtctccatccttttaagtatttgttactgagtgttttgcctgtattatctcatttttctcactttcagttgaaagaactttattgtgcagttgatattagtgttaccattttacagatgtgaaaattaaggcccagacaggcaatgttacacaaccaaaacagctactggatggaaccctttggatttgctactacccaactatttctgacctaaaagagtggtgattccatgtggttcaaattaatagcaagtggcagagtaaagatctaacagtgtttgactgatgtagagcagatatcctcaaacattgcacagatgtttcttggatatttgtccatgttagtatttatcattcttcacaacaagtatctgtttacatgtctgctttctatacctgactgtgagctcattaagggcaagacctatccatcattggcttctgaaacaccccaccaccactaggctatcccatagcccgttcttacacttgttcaacacatctctgttgaatgcaagaataaaccatttagaaattaattctcagtcctcttggataatcactggctcccccagcatcttaactgggcaccagctaagccactgtgctgcctaaatggacaaccacttctcagttctggaattcttcaaacacctagggttaggagggtcttcgctttggcagttagagttttctcaattcttttatgacacaggttgcaccggactcactcaactatggagatcagatgtcctcaggaaaaaaaaaaaaaaaaaaatacacacttaaggctgtttcctggctcctctctcttcctgacacattccaaaaaggaatttatggatgttgggaaggacaaagggtgaggaatttctaggacatttaagaacgcccatgtaagcaactctatgcttgacaggccatgcacaataaaactctttggcctgtaagcgagaagaaaaatttggtgtaagctgcctcatgggttgccaaaatgatgtggaaacaaattcatctgcatttctaaacaataggaattctcctcgtcctcccaaacctagaatatttcatgtatgtgcttaagtcaacaagataaatatattccatgagctactaaaaatgaaatcataagtaactaattctgaaatatgattctagccagttggaagtttcatctttatctaaaaatgaagttgtttattctccagctgtgaccagggaaaaaatcagattgttgatttcttcgtctagcaatgatctttgtcctgcagtgaggtgcccaaaaataactgttagcctattccctgctgcttccaaaaggttagctaccaaacagctctactagtaaaagagaaaaaaagaaggatttgacagcaagccaagaggcagcttaatgtgtaaaattatgagctaaaaagccattacgactggcatgacactggccttggtttcccaacctggtaaataaatttttatctcacagtaatgctctgaataaaagtctataatgccaaaatctgaagaaatgattcaacactgataacatttaacaccaaggcaattgaaataagattaaagcttaacatttaacccttcttccaccccacactccccacaaaagctttcaggaccattgtttttatcttcttattttttgtagcgggctggggccataaatgtaccaggtatttggagaatgggggactaaatattaaagcctatattctacccagccttctcaacagatgactaactgtgagcagttaggcacctagccttacagaggtgccatattgcttactgagttaagtaccagctcttcatattgatcttttatatccttcccaatatggcttctgccaataccatgtagtctctacctttctgctttcctatgcattattttataccctagtagaacaagacctctccatattccctgcatgctacaccaccttggcatgtatctggcacccacaaggagatgccactattattacagctatcttcttaattctcctcaccacccatgcattccaacttctttgccttttctcatggtgtttcttttttctagggtgctgtaggcttcaatttgaacccacctactggagttgtatccaaccatttttcagaatcttgcccatctttcaagtacatctcaaataccacttttttgagatgtctttcttgggaccttcaatggatatgagttggccaatctcttttgttacttgttataatcatgaatgtatctccctgattcccccatcccttctggatacaaggttttctttctgatctattctctattggatcagtgttgttattaccgctgctgctatcattagctaccacatattaagcacaccttaatgtgtgccaggcactgtgccagtagcttaacatatgtcttctcatttcatcccactctcctgcaacactatgagatagacatatgtatctccagggagaggaggcggggaaattgaggttcagaggagaaagggaatggccatagggagcagctgctaaagtgatagaactggattcgaacacaggtttattttacaccaaagaccagactctttcccccacacgcaactgcttcattaatggaaatgtttagatggctgaaggatatggactgagtgccctcaaaactctggagcacagcagtgcaggacagcagagaaacgggagtcatgagttgtctttgacaagctcctccagcttctaaggagaggctgaagcagacagaaagagacattagacttggccagagtggttcctggagcaacttggttttagtttaacgtggggagaagattcttacgagactctaaggtgtgcagagggaggaagaaaaaaatatttcttaacccaaggacaaggctgggggaaaagatgctgatctgacacagggtagttatctcttcagatctgcaaaggacaatagcattgaggattgcttctcacttgtacctggatatgttcaaacatgtaaggtatggaaactacaatgcacatacatgcttgctatagttaagtgagttagttgctaaaaagaagccattttttctccctaatccccgggctcttgtgtctgaggtactcacccattttcattagtcaagaaacttaacaacattgaaactttcttatagactcttcttgatcgctttgagtctcagtttcctcattttgtaccatgcgcttagtaaaaacaagcaatcctctaaaccagtactgctcaataaaacttctttggatgatagagatgttcttcatctgcactgtctcatattgtaaccacaagccccatgggctcttaagtacttgaaatgtgagtgatacaactgagcaatgagatttttaattgtatttaattttcattaattttaataatcacatgcggaatatgggacagagcacttcgaattcaagaccaatgaattcgaagtgttttatctctttttaaattttctatctcacggggaagtttttattgtggattttatgttcaccagattaactagcttttgagacattgacagggatggagatacacagaaaatctcacaaaaacaatttcataagtcacaggtatttgtttgactctaaaaattaattttaataaagaaagcaaagtctgacacaagtgtgtcttgttttgcgttagatacataagctgaggcggagcaaaaagcagcacaacatgcttagcttggaaatagatttgtcctggatatgggaccccaaaaatctgcgttttgtgccaatgcaaagactatgtctcttcctgattcccttctttgcaatcattgacttaccagatccttaaatatcaccatcaaagatatacacacacttacatatataatatgatatgtaataatatattatctttcattgtattataatatgtaatattatgttacatcacatattataatattatatgtaatataattggagcaactattatattatatatggagatatatatatacatatatatacatatatatatacatatatatacatatatatatacatatatatacatatatatatacatatatatacatatatatatacatatatacatatatatatacatatatatacatatatatacatatatatacatatatatacatatatatacatatatatacatatatatatacatatatatacatatatatatacatatatatacatatatatatacatatatatacatatatatatacatatatatatacacataccacgacatgcatattttctgggatcactgagagaggaaaagttctcactttgctgtagaactcttgtctttgcttaaaaacagacatatgccaaagtaggggtttcaaaggttaggagaaagaaaatcctagaaaagaaaaacattcattaaagtccatatttttcattacaaatgtttccttttattaagctcttactgctaccaaagactgtttgccatttctttcgcatacattatctcatgcacttttcacaatgatcctatgaggactcccttaacacatttattgatgacagtactctggcttatggtcacagataataaccttgcacaaggaacaggaagtgatcaaacagtgattcaaacctaagacaatttgcctataaaacttgtgcccttcaatgccattctatttacattctggtgctttggaacctgctacattctcaaagaagacctttctattgggtaccaattccaactagaaaagtctttctcctgttgtgctgaaatttgtcttctcataaccaaccctccctccctgcatcatccccagcacataaacgcacacacacacacacacacacacacacacacacacacacacacacacacacacagaggcacttgttctgtccttaggggctacaagaggcaagccagtgcctgctttgccaggatttctacatggtaaccctgacccactcaaccttggttttctcaactacaaaataaacctgcccaggtctgtagtccttcctcctacaagatattttccagaccttttattgctgatcaattttctataaagattagaatctgtgttttctaaagagtctctgtagaataagttgctcattctgaaattataaaagtcctactatcagaacatgattcttcatgtctgacctaaatacctccaactgcaatctcaagtaagtttccctgggttcatccacaaaggagacttaaaacagccagttgtctgcatgagaatattttacattcttaaaggtcattatttgcttcctattttttccctctctcatataaatatttctagttctagtaaatttacctcctcacccaccagtgatttctgcagctcctctttgatctagatccaagttgctgctgagtttaggactgtattcaactaggcggtcaagctcaggcttaagtaaaaggaggctattgacatggactcttgttaggttttgttccccaggagcgcaacaaaataggaactactgtttaatgagtgcctactacgagcttgacaccatgctgggtactttatgtacaggtctctaatccttaattttctctggaaaggttttgactcctttgttatatatgaggtcatggtttagagaggataagtagcttgtcaaagttgcagggctagtgagtgacatttgaacccaggtatgcctaattccaaagcctaaccattttctacaacactgaaaatataatggatttttcccaaagtacaaaaacacccactgccctcagaccaccatgagccaataggaaatacacaatgctcaagaataacatactctttcccccaacgatgcaacatttggtggtaccagtttacgtctcttaaacacacagtgagaaatcctcactctactcacactctggtcattattaccctaaactctttgccttggagtctcaatcagcaactataatggctttttagatggaaatttaagtcatttagcaacacacagaaaagtgttggggagaagtccaaaaacatttcaaacttggcccatggccctttctaaaaaaaaaaaaaaaaagctaagaattgatggaaaaggggtaggaaagtagaactttgtgaaggtgaagagagttagagcagccattctagtagactatgcagccaataaatatttgtccagtaaacacataagatggccaaattggtttgaaaggagagaacatgccaagtctccttttttataataatcttcattcagtggccttacctacattacagacccacacattgttagttaagaagctaatttcaatgagaaagcatgctcaaaagagggttgggtattttttgtttctttgtttttgttgttgttgttgtttttgttttgttttgtttttgcagatattacagggacagttggtaaagtgtcaataagaatataattagaatgtggtaggtatgtggatacgaccttcttagttaaattcactagtgctttctcagtccttaggcccctgatcagtcatatagaatgcttcccagttcaattttccttgccacaattcctctctaagttttgcaaaggctttctgtcatgaggaaggagatggtcagttgggatcatgttgatgcattctatcattaggataaaatctttccagaaaaaaagttagaaaccttcttataggctgaataatccaagcaccaccactaattgacataaataactaacttacagtgtgcgagtataagaatatcatgggcatagggaaatgtcaatttgtaaatgacatgctaaaaaccaaatagcagccaggcacggtggctcatgcctgtaatcctagcactttgggaagttgaggcaagtggattgcctgagctcaggagttcgggaccagcctggggaacatggtgaaactccaactctactaaaaaaaaaaaaaaaatacaaaaaatcagccaggcatggcagtgtgcacctgaaatcccagctacttgggaggctgaggcaggaggatcacttgaacctgggaggcggaagttgcagagagtcaagatcatgccattgcactccagcctggacaacagagtgagactctgtctcaaaaataaataaataaataaaatagctcttcaattatcatttgaattttactcgggtgcatctcctaattaaagaaaaccatgaatgacttcatatcgtgtatagatcattctcacatgcctccatagcattgttttagtaaatattataactgccatttcttcctgtctttatttagtttctcaactgcctctaacaagtccccttttctctgctacctgattgctcatacaggtgaatagctctaagagagatgaataagataacttggcaaagtgagaattgcttcatggtagcatattctcctccatattctgttcccatctaattcttctcactatttaaggctcagcttaaattttaccctccctttcccataagctatgccccacctttctcttgaccattcctttttattttcaaaccccataggcagttatacactataccacaaaacaaatcctatacattctttcttgctttgctccttaagtactggatggatgattccattttcttcttaattctattgttaagtcccctgatggtatgtatacacttggtcttatatttatttctaccaccctcagacctctgtaaaaatgctataagtacttgctgattggagaagacatcagaggctcttagacatcctttctgagctgtgagcctcagtttagacaactggttcaagaatattctgtcaggctcttctaaaaactggacttttgaaggttttggaaataaatcaaggagcagggaaactgaggtgcagaggagtagactgaatgctatactgacagtcatataactagtaagaagctcggctgggattaaaactgtttgcctcctagagtcctttattttaacctctgcctctcatgacagaagagaaccagcagatggtgtggaaatcagttttgaaaatcaataagaggcaagagttactgaacatctaccgggaccagggcctttataacactataataattcactcagaagacatagtaaatactgaaggaattaatgaatacacaaataacttctacatcattcttttaaccctgtcattagcaactatgatcttcactatacagaaagtgaaataaggcaaagaaaaattacataacgtatccaagggaccagagctacagccaagatacaaacctatgtctattttatttcaatattttacctttttctctctatttttctgtctccttaaatttacagaagttgaatagtgagtgaaatcattccttcaagtgacaaagttcttttagagaccattgtatgttatttcaagggtatataatgaaaaattatcaggagagcttcaaatacagggatataaaatcaaaattcacttggaattgtagatattcaatatattcaatagtagatactcataatttttttgttcatctttgcttgtagaaaataattctttcaagaagatcagggacaactgatttgaagtctactctgtgcttctaaatccccaattctgctgaaagtgagataccctagagccctagagccccagcagcacccagccaaacccacctccaccatgggggccatgactcagctgttggcaggtgtctttcttgctttccttgccctcgctaccgaaggtggggtcctcaagaaagtcatccggcacaagcgacagagtggggtgaacgccaccctgccagaagagaaccagccagtggtgtttaaccacgtttacaacatcaagctgccagtgggatcccagtgttcggtggatctggagtcagccagtggggagaaagacctggcaccgccttcagagcccagcgaaagctttcaggagcacacagtggatggggaaaaccagattgtcttcacacatcgcatcaacatcccccgccgggcctgtggctgtgccgcagcccctgatgttaaggagctgctgagcagactggaggagctggagaacctggtgtcttccctgagggagcaatgtactgcaggagcaggctgctgtctccagcctgccacaggtatgagctggtggcccgcccagtcccacactgtgcaaacatggagaaatgaagagcatagcagcatccatcacttgcttccaaagtgggctcactagaaaactagcttcccagagtgttcattacaaagagattttatgttcaaataagtgtggagactgcagccatctctctcctgcttggaggagtcacggcgacaactgcttctcagaggaattttcaggcttctgataagtcctgctttgaaaaaccctattttaccttaattataagtttctaaaacgtatttgaccatgaaatctacccactttctaccccaaaacctatgagtacgccatgaaatttctaccccagagagcactctctgataggtactgctgtggccccatcacctcattttacaaatagagaaactgaggcctggaaagaggatgggattcctgaaggtcctccaataaggagtagagttcctcacatttcagtattcttacaaatgcacagtgctgcctgtgatagtgctgagttataagaattagaaaaaagttccaatttaatagcaattacaatgattacaatcatataagctccctctgtgtaacaggcactgttgtattatctcatttaatcctcccaacagccctttaaggtaaagattagatgaggggaagataagtcctcttctacagatcaaagaaatgaatctcaaggggattaacccactggcacaagatggcacaaagagcaataagagatagggtctttggctaggcgcagtggttcacgcctgtaatcccagcactttgggaggctaaggcgggcggatcacctgaagttaggagttcaagaccagcctggccaacatggtgaaaccccatctctactaaaaatacaaaattagcagggtgtggtggtgcatgcctgtaatcccagctactcaggaggctgaggcaggagaatcacttgaaaccgaggggcagaggttgcagtgagctgagatcatgccattgcactccagcctgagtgacaagagcaaaacaccatccgaaaaaaaaagagatagagagagagagagagagagagagatagggattttgcatgtgcctgtgtgtctccagagctcatactctcccatggatgccctgtttccacatgcatcctatttcaaggaattttgctgctttggaattatgtctttatctccaataactaaagttgataaagctacatgagtttcaacaacttcaaatcagagctgaaaatctgtttctgccactcagaaaaaaattaccaaaatgttcttcaacaattatttcaagagtaaacctaaccaccctaagtgaaatagtcttacggctctgcaggacaggctctaggtttctaaggcaatttttaaaaacattttctttaggcataagttagtttatcttccacttctgtcaactccctggaaaaatgcagatgagaatacacagtaggagtaatgctaagtagtcagttaaaatgattgtttagagcagtgctgtctaatgaaaatatgactcacacatgtaatcttaaattttctagtagtcatgttaaagaaaggagaaagaaacaagtaaacataattttagtcatctcttatttaattcaacagagccaaaatattggtttttcagcctgaaatcaatatcaaaattattaatggatacttctcagtctattattttatactatttggaatctgatgtgtattttacacttacagaacatctcaatttagactagccacgtttcaatgcctaataaccacatgtggccaagggccaccatactagatagtacatacttagactctcactttacaaatcagctttttttaaaaaattctttcttcctgctgtcaagaatgagataaaatatattaatacaagctgtttctacgtacagagactacagagtgaatatactctagtgcagagaatatagaactgggttttgtttcttctccttaagctccatggagatcagaccaatgacttctgcaaactgagctaaggcaatatttaggcctcaaggggctcgagtaatgtcaaccttgaccccacattctttaagttgacctccacttagccttcaggatagaaagaaataaaagataaaggcactatacttttctggggacagagccaaactgaaaggtgtccttatagaattagaaagccattagctacctcattttagttgcggaaaattagaatgttttggttatataaacccacataccaacttgagccaaccttccacaaaaaactttggaaaataaaacagaaaaaaataacaaggacacaagagtgagctcttaaggggtttacttaactcggatataccccagggaagtgggctattggcccaacttcacgtataagaaaactaagctccagatagtctaaatcccttgccaaatgtggcatagatattgaatcaaaaagtcagaattacattcagttcaacaactatttcttgggcatcttttatgtgcctggccttgatgaggcactaaagaaataataacatagtggccagtcgtggtggctcacacctgtaatcccagcactttgggaggccaaggcaggcagatcacgaggtcaggatattgagaccatcctggctaacatggtgaaaccccatctctacaaaaaatgcaaaaaaaattagccgggcatggtggcgggcgcctggagtcccagctactcaggaggctgaggcaggagaatggcatgaacccaggaggcggagcttgcagtgagccaagatggcgccgctgcactccagcctgggcgacagagcaagactctgtctcaaaaaaaaaaaaaaaaaaaaagaaaagaaagaaatagtaacatagccccagcctaatgcatttcacaaggcagtgactcataatcatcataggaatagtaagacttcttgaaaatgtgacaaaaactatgaatccgctccccaggggtggaaatacacacacacacacacacacacacacacacacacacacccctatgcataatcacacactgttttggcatacaagcctataatttcagggaattcaggttatgaattcctacctggtataacaggatgtgagtctcatctgatttcacacactacaacaaatggttctcaagccagatggagcctgagggtgcaaccgtccttcagctgaatttgaatctgggtgccctgggtagatacagaaaaatgtggctgcttaagcctggctgagaacttctgtttcttttgttgcaggccgcttggacaccaggcccttctgtagcggtcggggcaacttcagcactgaaggatgtggctgtgtctgcgaacctggctggaaaggccccaactgctctgagcccgaatgtccaggcaactgtcaccttcgaggccggtgcattgatgggcagtgcatctgtgacgacggcttcacgggcgaggactgcagccagctggcttgccccagcgactgcaatgaccagggcaagtgcgtaaatggagtctgcatctgtttcgaaggctacgccggggctgactgcagccgtgaaatctgcccagtgccctgcagtgaggagcacggcacatgtgtagatggcttgtgtgtgtgccacgatggctttgcaggcgatgactgcaacaagcctctgtgtctcaacaattgctacaaccgtggacgatgcgtggagaatgagtgcgtgtgtgatgagggtttcacgggcgaagactgcagtgagctcatctgccccaatgactgcttcgaccggggccgctgcatcaatggcacctgctactgcgaagaaggcttcacaggtgaagactgcgggaaacccacctgcccacatgcctgccacacccagggccggtgtgaggaggggcagtgtgtatgtgatgagggctttgccggtgtggactgcagcgagaagaggtgtcctgctgactgtcacaatcgtggccgctgtgtagacgggcggtgtgagtgtgatgatggtttcactggagctgactgtggggagctcaagtgtcccaatggctgcagtggccatggccgctgtgtcaatgggcagtgtgtgtgtgatgagggctatactggggaggactgcagccagctacggtgccccaatgactgtcacagtcggggccgctgtgtcgagggcaaatgtgtatgtgagcaaggcttcaagggctatgactgcagtgacatgagctgccctaatgactgtcaccagcacggccgctgtgtgaatggcatgtgtgtttgtgatgacggctacacaggggaagactgccgggatcgccaatgccccagggactgcagcaacaggggcctctgtgtggacggacagtgcgtctgtgaggacggcttcaccggccctgactgtgcagaactctcctgtccaaatgactgccatggccagggtcgctgtgtgaatgggcagtgcgtgtgccatgaaggatttatgggcaaagactgcaaggagcaaagatgtcccagtgactgtcatggccagggccgctgcgtggacggccagtgcatctgccacgagggcttcacaggcctggactgtggccagcactcctgccccagtgactgcaacaacttaggacaatgcgtctcgggccgctgcatctgcaacgagggctacagcggagaagactgctcagagggtgagtgccagggcgcagaccagcatataatggccatgatggagtggactcctagtatgggttggaaaactacgtttatatatataaacattcatgcacactgattctttgtacgtattaatatatccatttaaacacacacccataatgactttttaagggggccctgtcattccgttgttacaaggtgacctatttaagggctgaagggctcagagaggttatataattgtcccagggacacacagctgacacatcacagagctggtattcaagtctgcctaactcatctacatagagtttaaaataaagttggagaggccagaacacatctagtgttcaagatgaggtagataaagggatactctctcttttgctaaatatcaactttatttcctactctccactgacatcaaaccaacagtaaacaaaatctctgtatttggatggatgtaaaaattcagctaaattgaatacgcagtgagattacataaaaacaactgtttcaaatgcatacttggctaaagacgaaatgcctattatctacaagattgacctgtcttttcattgtcttttgtaactggttttgtttttttgattgttttgtttttttaatcctaaagactgcaagctcctatccttaaaagggcactatttctagcagttagtatgggacctggtacatattaagtgcttagtaaaccctggttaagtgaaaacacaggagagaaaattaatgctcatatttaatgagtgtcttctttgtactcctctcatctacccatattatcattgtcataatggagaattttttcctttactaaagttattggtatctaaacataaataaatggctttgtgttcaatgtggcgcaagcagggaagcctggttggaaagaacaccaggctggcagggaggagatacaagttctaaacttgatgaggtgagcaagcttggtcaaggcgttctgtcttactcacctctataatataagaaagttggaccagatatgcccaaaataccctcccagtgctagggacacgtaactcaaagttcagagcagggagtgaggctcagactgcactttcccatgccaacagcctgcatctgagctaagacccaggaagcacagaaagttggagaggccagaaacacccaagggcacactgctgacctgggactccagcctgaaggaaatggactaaggaacagccaccacaggtcttaagatggatcacagcagggggtccctgatgccatctgcattttagaggcaacagaagatcttcagacctctgtggctgacagtggaaaagacaggtcaaacaaacctagagagattttagaggacacactgttgacaccagatgtcctttcttattcctgccagtgtctcctcccaaagacctcgttgtgacagaagtgacggaagagacggtcaacctggcctgggacaatgagatgcgggtcacagagtaccttgtcgtgtacacgcccacccacgagggtggtctggaaatgcagttccgtgtgcctggggaccagacgtccaccatcatccaggagctggagcctggtgtggagtactttatccgtgtatttgccatcctggagaacaagaagagcattcctgtcagcgccagggtggccacgtgtgagtgagcagaactcttttgggcagcctcacctgatgtcagcccacccagtgtataaccctccctcgccacggcccctacaatcctatagttgttctttacagttataccaaataagagcctagaattaagtccatagaatcacttattaaagaaatccctcattttccatcaaatctttctccttgctctcctatatacttcctgccagagaaaatcattacaagtaacatttagcaagtgtttactgtgtatcagactttgttgtaagcagtctacatattagtataagagtcctcatttggccgggcatggtggctcatgcccgtaatcctagcactttgggaggccaaagtaggtggatcacctggggtcacgagttcaagaccagcctggccagcatggcgaaaccctgtctctactaaaaatacaaaaattagtcgggcctggtggtgcatgcctgtaatcccggctactcaggaggctgaggcagagaatagcttgaaaccaggaggcagagtttgtagtgagctgagatcatgccactgtactccagcctgggtgacagattgagactctgtctcaagaaaaaaaaaaaaaaaaaagagtcctcattatatgagttagtatatgtatgaaataggagctattgttaaccccattttacagatgaggaaactgagactgcatggttaagcatcttatcccaagtcatgcagctaacaaggagtagaggcaaaactttaaccctggcagtcctggcaggtttatgttctaaaccactctattacttttcagtggagatcactgactatttttctttaagtggaaacattctggtttatgagtttagcatcagtataattaccttcatatctaaaaagcaagctctggctagaaattgacccttttttccttaataataacattggctgccatttattcaacttgttctgcatgccacgaaccaggcccagcagtctacacactggagtggagtatatcactcactcctcaatgcattcccaagaagtagacatatttaccttctttttccaagtgaagaaactcaggcttagagcactgtgtgcaattgctcaagttcacattgatagtagagcttagattctaaccccaagtctgtctgattccaaagcctgcgttcattttagatttaaacatatgaaattgccaaaattaatcataccatttttcctaatattaatttttatacagcctcatagagacctcatcccagaagaagctttaaaaggacacctgctctggttgtcagcccctgactgttgcagacatccagtctggtttagtggaatcgtggccgcgttgcccaatcacacacctgccctatccttacgttctatttatgttgttacttacagacttacctgcacctgaaggcctgaaattcaagtccatcaaggagacatctgtggaagtggagtgggatcctctagacattgcttttgaaacctgggagatcatcttccggaatatggtaaggagtacaaaagagcagatccatttgatctcaaggatttgaaagatgaccaaagggttctgaagacttctgtatcaactaattttccttagtttttggtggaggacaaggctctcattagcatcatttgtgtttgcatctatattttaagggatgttggtttttccctgattttaataagtaagtgtagcacttacggctgacaccctagacaaatagaagttgtcacctcaaggttccaattgtccatcatcaccttagaaatctctactcagaggcaaagaagagaagaaacagtctctccctcaaaataaaggtacatctcagatttgagcaacccttctctccaggcccaaaagtacatgtgaagcagggaacttgttctctgaatttaagcccaggctctgccaccaaccagctgtgtgactatccaacaatcaccctactcctctgatgctggcctcagtctacccaaggagggattgagcttgtgccttcagaattcctttggctctcacattctgtcatttgacttgcatgacaaaggggtaaaagtttacgaatgggagaaacaaactagagaaatgtctttatcatctctgtatcctcagtagcttacatactgatctgatgcatagtaagtgcctaatgaatcgatgaaagaataacagaggaatgaatgaatgcagagtgaatgaatcacataaattaagagactggcacctcccctaactcttaccaagctgcctctatctctcagaataaagaagatgagggagagatcaccaaaagcctgaggaggccagagacctcttaccggcaaactggtctagctcctgggcaagagtatgagatatctctgcacatagtgaaaaacaatacccggggccctggcctgaagagggtgaccaccacacgtgagtatcacctttaatacttatagaatgataaggctgattgtacctcatagcacctcctggttgagaaagtgccttctcatatagcatctacatcatttaacttttgctgcatttttaaaaatccagatacagtggtttaaaataacaattctttgcatgttggtgatttgggtttgggctcagctgagcagcttatctgttcttgactgcactcctcatgtatctgtgtgcttaaggggtggattggcctaggatggcctcagccaggatggtgtctttctgtttcgcagagcctctcattctccaggatgctggtcctgttcacacagctattgaacaggttcaaaattggcattagatcacttctatcaaagcacatcccacggccagtttatatttaaggaatagagaaacagatccatctcttgatgaaaggagtttcaaaatctcctttcaaaggggtgtgactacctgaagataattaagcccattgctaacaatctaattagcatcatgtcactagtttaatattagcacccagttgtaggacagaggaagggaaaatattaatgttaaggcttaaagaagctaaatcactttaacatcccatagttaacaccatcaggggcataactttaagccagggtaagttttataactttaaccccatttccactaacattgactaggctctggtttatgtagaatgttgattccatctcttcaatgggaacctaaataaaatttcattcaatactaatgatgtcagaagttcttgggagtagaataggatttagcagtactagatcatttggtgagaaaaagacctgaatttggagttgctccaccaggaaacattttttttttttttttctgtcacccaggctggagtgcagtggaacgatctcagttcactgcaatctctgcctcccaggttcaagtgattctcctgccttagtctcccaagtagctgggattacaggctcccaccaccacatctggctaatttttttgtattttagtagagatggggtttcagcatgttggccaggctggtttccaactcctgacctcaagtgatccacccgcctcggcctcctaaagtgctaggattacaggcgtgagccaccgtgcacagctgcaattttttaaaaagaaaaaaatgcataattttgcacttccatataggaaaacctctttattttcttcaagataacatatgcgccaactctttaagtaatcgactcttcttggcagggggttgttggaaaaattaaatcagttgctaatgacaagaaagaacatcttgcatttaaatatttgcacattttgcctagctcagagccaattcaaaggattttctctttcataagcaagtgttttccatcatcctgacaccacctctctgtggtaggtagaaaagcaggtaccaacaggaaaaaaaaatcattagatcaccagaaagacaaagaaaagacaaagcaaatgcttagttgctatggaggaggtgcactgaactttttttttcactgctcttttgtttatctaaatttgggaattgtctgctttatttcttcttattttagaacaaacattccaacatttgaagttgcataatcataaatttcaacatagggggacaaatatttacctgttcattttgtatttttagtagagacaggatttcaccatgttggccaggctggttttgaactcctgatctcaagtgatccacccgcctcggcctcctaaggtgctggcattacaggcatgagccgccacggccggccacaatttaccacatatacctgaaacctttaaacctttaaccttttttccagatgtaaagggccttaaacttctagttcagaacacatttggctccttctgtctggcatctatataaaggtggtattatacttacttttgaggtcaatatgtttgagaggtgttgtcatgtaaagggggaaaaggatgggctttggattcaatcagttctgagtttgaattccatctttaccattcaccatcaccttggaaaaatctatttctttaagctccagatccaacagctgaaaaatgggtttatagtattctccttgtggggtcgtcataagactcaagacataaataacaaagcaccatctttgcacctgataaatacagagcattgttagtttctgctattcaagggtcccaaatctagggggatatcagtgtccttgacggaaacccaacttctttaatgcaaggggtactaaggaaggtagtaggtacggtttgggtgcttgctagcacctataagaacacagagcaggcagcttctgtccatttttgcgacatcattttcattgtgcattttacatcatctgtgagctgggactgatgtgtcaacacctagacttcaaaaacagactctgcagttttctcacaatctgctgtaaattattgttccttttcattccctgtataaagcccacttcctgtcacttgttattgtttactgaaccaatgctgaaaacacatttaaaaaaaaaaaaaggagaagaagaagaaagaaagattcaaagattcactgaatacccagaatatgcctgtctctgctgggaatttaaaagactcactctctcaatcaatgaataaccctacctaaattgactcaaactgtacagaaatctgttatgaaacaatgagacacgtatgatattagaatgctcttcaaggacagtggcagccacagggagggaatatgtgtttacctgactgaagccgggttaaaaaaaggcttctcattaggagacaacatttaagtgggattttgaaggatgcataggagatttttagagggaagtatgatcttagaaagaagaaatgagagaacagcatgtacagagaccaggcggtgcccaacagcataatgtgcttccagagctctgagcatctatcagagtacaacaccagagtaggtggggcagaaaaagtcaagatgagcctgcaaaaacaggcaaggcttgaaatagcaatgactttcttgcgtgaattctttctatcaaaaataagtttccatacactgtcaagacagtctattgcctcacttttctgcttggtaattctgatggaaaagttttcaggaaacatccaggaagttttgcctaattaaaaatttaaagagactaagttcatcttttcaaataaagtatccccaaagcatgtttcctcaacttatgagaacagtaataataataataataacaaaagaacaacctttttttttttcatgtgacatccatgggccagtctctgtgctagatgctttgcaagctttatctctcttaagatttgaaaaaaacaaaaacaaaaaacactagaggtagctgctgttatccctacttatagcttatcaaaccaaaaactaaggttcagaaaggcaaagtaaagtcaagcagttagtataagtattcacccacaggtctggagagttacaaagtcctctctctgctaagcctcaggcaatggccctaacctctgaagcctctctgtcctctgcccatcataggcttggatgcccccagccagatcgaggtgaaagatgtcacagacaccactgccttgatcacctggttcaagcccctggctgagatcgatggcattgagctgacctacggcatcaaagacgtgccaggagaccgtaccaccatcgatctcacagaggacgagaaccagtactccatcgggaacctgaagcctgacactgagtacgaggtgtccctcatctcccgcagaggtgacatgtcaagcaacccagccaaagagaccttcacaacaggtaaaaggcctccccctgttaacagatatagtaaaggaaagattgaaagatttccatcccactccatgttggggtatcttccaggctcattttacagtacgaaaaatgaaaggggtatttctactcctgtaaattttaaaatattgtagcaatttattaattaatttttcaaaaaaaattccaaataaccttccaaagcacttttgggggtgggggacatatgtagaagatgctggtctgatattctcagacaaaagttctggttaaaataaagttcaaataaatatttttaaagtaaaatatggtatatggaaaacatatatgacaaatgagcctcctaacactttagcctacggcattattttaaaagttcaaaagtgtcaatttttcattcagtaaatatttttcagagctcagtaagtactttgtgagttattagaaatatgatgaggaggccgggcgtggtggctcacgcctgtaatcccagcacttggcaggctgatgcaggcagatcatgaggtcaagagatggagaccatcctggccaacatggcaaaaccctgtctctactaaaagtacaaaaattggggtcaggcgcagtggctcacgcctgtaatcccagcactttgggaggccaaggcgggcgaatcacgaggtcaggagattgagaccattctggctaacacagtgaaaccccgtctctactaaaaatacaaaaaaaattagccaggcgtggtggcgggtgcctgtagtcccagctacaggctgaggcaggagaatggcatgaacccaggaggtggagcttgcagtgagccgagatcgcaccactgcattccaacctgggtgaagagcgagactccgtctcaaaaaaataaataaataactgggcgtggtggtgtgctcctgcaatcccaggtactcgggaggctgaggcaggagaatcacttgaacctgggaagcaggggttgcagtgagccgagatcgcaccaacacactccagcctggtgacagagcgagactcttgtctcaaaaaaataaaataaagaatgaaatatgatgagaaaatgcaaaagaccagtttttacactcatgagcttatttttaagtctttgcattgtttctttaaccacaaagtctgagaaaaacacaaatgactaaagtgtcgcactcatccataatagggaaaggtgccaaatctgtagcacttgtttagatttgcacatccactatggggacagatgagtgtgctgagaattttgtaatttctctccagttccaggcacgtttcatatgtcagcttgagctgtcaaagactcctgctctcttgtgactgatatgttcaatacaaatgttccttctctcaaacaggcctcgatgctcccaggaatcttcgacgtgtttcccagacagataacagcatcaccctggaatggaggaatggcaaggcagctattgacagttacagaattaagtatgcccccatctctggaggggaccacgctgaggttgatgttccaaagagccaacaagccacaaccaaaaccacactcacaggtgagctctgcatctctgcaagcctgagccagccagccctagagggcccttaaaggatgggcacctgctcccacatgtccccatttgcaaccctcagaaataagtccaatttcctgaaatactgcttattggattgcagtgagttcttttgtaaaacattccgaaaatttgttgtagcctccagagaccaactcaaagccatttttatcatcctctgaaagtctctctgatttcaggatgaatctcaacttgcacattctctccttaggtctgaggccgggaactgaatatgggattggagtttctgctgtgaaggaagacaaggagagcaatccagcgaccatcaacgcagccacaggtggggcacacctggaattcccatcccactgagctggtgctgggcagatgagacagagtcaatgtggccaaaacctatttaaagagaaaaagtagaagcctggaggaaaaagggccctgtagtaccatctagccccaatgttgaaattcaaaaggaacataagtacggtccatctgtatgatgccaacatcatcccctgtatggaaaaggggactggggattttgtgtttgttgttgttgttgttgttgagatggagtatcgctctgccaccaggctggagtgtagtggcatgatctcagctcactgcaacctccgcctccagggttcaagagattctcctgcctcagcctcccgagtagctgggactacaggtgcataccaccacgcccagctaatttttgtatttttagtagaaatggggtttcaccatgttggccaggatggtctcaatctcttgacctcatgatccgcccacctcggcctcccaaagtgctgggattacaggtgtgagtcactatgtccagccgggattttttaaagaaaaattggaaccaggctttgtaagaaattcatgaacatgtgtaagttggtaatcagttgcatcttttaaataaaccattatctagtccaaacacaactgtggggttttctctgagaaaacacctaacttttatacccctgtcaagcagattataagtaacaggattgtagtttaagtccaggccctgcacttacctgttgtatcctgtagccgcagcttgtaggtgaggatgctgaggggctacctgatttgaggtcattgattctttcctcaagatttttttttccatttttctgggaagtttgcactgcaaaaagaaaactcctcctctgcctctcccccagcccccagcttacctccccacaggcactatgaggaagaaggaggctagtgtgtaaagaggagatggatcatcattgagcttccacattatgcgggatgcaaggccggacatttacatgccaattctttttttttaatcttttgattttgagataattgtagattcacatgcaattgtgagaaagcatacagacagatcccctgtgcccatcacccaggttcccccaagggtagcgtcttgcataaatgtagactaatataacaactgagaaattgacattggcgtaatctgtccactctatttatatttcaccagttttgcatacactcattcgtatgtgtgtgtatatacttagttctatgcaattttatcacacatgtagatttgtgaatgcaccactagagtcaagatacagaacagtcttactacaagaatcccacatgctaccctttgcagccacagccacctccctccctttgcccctctgcctaaccctgggcattcatttatctgttcttcatctctatgattttgccatttcaaggaatgctgcataaatgggatcctacacatattagtccatttgagttactgtaacaagaataagaataccttagaccaagtaacttataaacagaagaaatttatttctcacagttctgaaggctgcgaagtccaagatcaagatgccagcagatttggtgtctgatgaaggcctgctttctggctgacagcaggccatctttttactgtgtcctcacaggacagaaggggcaaggtctcttttataagggcaccactcccattcatgaggcctcccaaaggtccctagatccaaatgtcttcacattggggattaggtttcaacataagaactttagagaggcacagacattcagtgcatagcaatacagcatgtaacattttgaaactggctttttttccttcagcataattctctcgagattcatctaaattgcttcttttatcaatagttggttccttttaactgctttaaatctgagcagcattttatggaatggatattccatgacattattttcaatcttctcagactccgatggggtcatgtgggtgatgtataattagacctattttacaaaagtaaaaagagagacccagagatgtgactctcctgtggtccctcagctcctctgtggcagacctaggattccagcccagatgcagttgactttcagccccagaagcagccctgtcttgcagcctgaagagcattcatctctctgttctcctcccagagttggacacgcccaaggaccttcaggtttctgaaactgcagagaccagcctgaccctgctctggaagacaccgttggccaaatttgaccgctaccgcctcaattacagtctccccacaggccagtgggtgggagtgcagcttccaagaaacaccacttcctatgtcctgagaggcctggaaccaggacaggagtacaatgtcctcctgacagccgagaaaggcagacacaagagcaagcccgcacgtgtgaaggcatccactggtgagtctgccctgagcttcctccaaactctaggttgattctgaggttagcagatctcctcagccagggtgtcctcacatgagaaagccaaatgcaaaagcaagccactttctccatctctgaagcccctgaacaccactttgaaagggctgcttactcgtcttttctacctcctgtcaactgatacagcaaatttcccccactgggaaataggggttttaaaatatttcttcctaggagaactttaaacatcagggtttgtgtttgcatttacctatgatttttgttttcttttcttaactgtgcatcacagcatcttttcaattgtttcttgtttatttccttcttttagcctaataattaatttacttttcattttacttcatttaaagatgaccaagatgttggtaataatattttttttgttgttgttattttctacaaactgtttttattccaggtcttttgctttctgccaaggttacccctgaagagtggcacacggccctttgagacttccatggtgccctctcattttctcttttctcttagtcattaagacattaacctagtttgtctatgacgacagcttaatcctgacattgtggcccatgcaacttgtgtccattctggcccatgcaacctgttcactgaacctgaggccatggttactcggtggctaaactgaagagacaaccaggtttttaaaatatttcttcctttatgaaaaataagcctattcaattttggccaccaaatattcgaaatgtataggtggaaaatgttacttttccagggtttggcaagtaatagtctttacttccaatttaattagtaagcatgtattgagtacctactgcatacattgtaccgtactgatatttgaggaaaagtagttcccaaagtcagcattgttatgtggactcatttgtgcctgctcatagtgcttgcggaagactagatactcagaatgctagacagaactcgagaaaaagagtgatccaaggaaatcaggagagctggcaaaggtgttatggcaagggatgttattccagttgaagcttgatatgcaagaaaagggttagaagtgtggacatatttggaaatggcttgaagagtctttctcacaatatcttcagtctcaaatcacagtcacttacttaagatagaagttggttttctttcttataaaatgaatctggagctgggaggtacagggataacttagtagtttcaaattgtcaggcacccaggctgcttctttcttttccaccatttttagtccttggcttccattctcaaagtcatctcagtgtcacaacatggctgctgtaatacagccattccatctgtgttctaggcagcataagggaggaagaaccaaaactcccaaagaggagcaccttctgggtgagtctttctggaaaccccaccaatcacttctccccatagttcattggccactcctagctgtaagggaggcagggaaaggtagtcttctgtctgaacatgttacttccacataaaattgaggtcatttgtaagagagaaatttggcagacaatgagcagtccctgccagagtctgaaatgagtttacgtggtcaattctgttgactctgcattgactgcttcccacccaactataagatgtttataaaggatgctctgaaagaatagtttaattaaaaaataaggtggggggcggggatagaaccaagaagaaataaatctatagtagagatttaaatttcagctttataaacatgagcttgttataaagtgtcaaggggcaacaaatgaatcagaaatgcccaaaagatgaaatccctctcttttctttctctttctctctctttcttccctcttccctcactcctgctcttcttcctcctcctccttcctctgcccctctcccttagctttcccttgagtttgataaatgctgtatctaagagagattcctattgcccctcaatcattccaccttctggtgatggccacattgcctccttcctccagtgagaaaacctcacacctgcgcagtcactgaagaagttttatctccctaagatcctgaggtgtggggcttctccactagagaaaggaggtaatgtggctataaccaggagatttactagctagaattattctgtttctgaatgagagccccatattggcattccaaagcctcagcagttgcatttccccaccacgcctccttaatgccatttcaaagatatcatgtttcgtatttaaagacattcttcagtgtgggaaaaatgtgcaaagttctttttattggttcttctccactgtccacagactatttcccccatccctttctccacaggaaaaaatatatatgtttcatttaaggtgaagcagacgcttctttccctccttgaattctaacttttaaagccttctgcattcactcagtcaataaaatactatcaccatgctctgtgctaagttctggggttactagagcaaagaagacgggtatttaattccaaggaactcactgtgtagcgaacaaacagacactgagataacattctgctcactacgatcgagggtacagagggtgcagccagtgctcaggagacactggatctaacttcagagaatcaggaaaggcttacaatgggaagacgcttttggacagagacataagaggcaaacatagatgtgttaaatggaatagctaaagaagtagaagcccaggcacctgaccttggtaagcatagaggaagaaagaaaacaggaaaagcgagagctcttgggtgaaggagccatgtggctataagtcctgaaatgttgcagagttttaggttcaaccatcagaagcaagaaccttccagctctgtatcactggattcttaatagcagaagcctgccaggcgccactcaatgtctgtggggcttacagagaaaaatgaagaatcagtggccctgaagaatttttcctggggaattccagggttttactgatggattgggccataatgtaagtctttttcttgatgtggcaccatactaaaaatatgcataacctggccacctatcacacctctcgcccaaagacccagccatgggttacagggccctacagaatctggcacggccagcccatcctctgacctcagtcctgccactcattcccttgctcacttcaccatggcctcttgggccttcacactgttccttaagctttctgagcctgctcccaccctcgggctttggagtgtgctgctcccactccctggataccactcttttcccagcacttcacagagcgtgctccctcatttcactcagcagctcagatatgacccagaacagagggcttctctgactaccagcctaaaaaggcacccccatcctgatctaccccttcaagctgctctaggtttccttgtgaaacttatctgccttgatattatgcaagtattggtttactataatatctatggcctgcctccccatcagtgagcagaatataaggactgattccatcatccactgctgaatcccagtgccctgaaggcagacaagtatgtggtatgagcttcatgagtgtttagggaccctggctacttcagagtcagcatttccatagaatcttctgattcttcccttccacctctgcattaacaccccaattctttccttaaggcataagggaaatcattcccttggaaagtcttcaattccgcttaatctggatagaaaaggaaggaaggaaggaaagaaggaaggaagggaggaaggaagggagggagggagggaggaagggaggaaggaaggaaggaaggaaggaagggagggagggagggagggagggagggagggagggagggaggaagggaggaaggaaggaaggaaggaagggagggagggagggagggagggagggagggagggaggaagggagggagggagggagggagggaggaagggagggagggagggagggagagagggagggagggagggaggaagggaaggaaagaagggaggagggaagaacgaaaggtaccgtgtctgttggcatttaaaaaaattagtgtgtaccaggcatcattccctctcctcctctcccattccctcccttctctttccctctcctccactctattctcctcccctctccttcctctcttctcccctcttctctctcctctcctctctctcccttttctctctgcttttgtactcttataaacccaactaaaccctgcttaaggtcaaagccatgaatttgctgcatgccataagagacaggaggcaggggtgataggcagaaacataaagccagcaaagcatattttcatagcaacataagccttgacagtgacaacccagtagctctcaggaattttggaagaagaaaggtggaattttgtttttagccacagctaccagtaatacagaacattctgctcttatttgctattttgattttctcacagaccaaactgaaatttattcaaatatttattcatccagcaaatatttatttcatacctactgtgggtcaggcgatgccggtgtatagaagagaaagaaacagcttctcttctcaagaaatggtgcacgttgctataagagagagaaccaaaacccaaattataacactgtagcttatctgttttagagggatttgtgggaggctgcaggagcatacagacaggtacccatcacagacctaagcaaagggaatgaaaagcactggagaaggctttttggaagaagtgatgtttggttgagttctgaaaaagaaaaggggctgggcaagtggagaaagagtaatgacatttccagcaaagggaatagcatctgaaaagctgaaaagcatgagaaactttaccttagtgaactgcaagctatacagtcctgctatatgatagagtgggaaaacagtagggtaggaggctagagacatcatcaggggcatctgcaaaggggcttggttcttggcagttacaaagaaatcaccgaatgttttaaggcagccaaggcttctcatttcaattgtcttatctctgagagatgagagtaaagcgactgaagataccctttggggttgtcaggcttggatgtgaccatgcccctgctgtgggagaatcactctttctcccctaagtggacgctgaagtgagttcctcatcaagccagcacttggtaatcactatctagaagatggtaacaatctacagatttttaagttggcactgtcagaaattcctccagaccagctgctcaacccaccaggagcacagcaatgggtttcaaaattctgatttcccaggcccactgacattgttcaagggtagattccagtgcacagctgtaagaagaagacaacagccttttgataaagaaatgccaagaaattcagtgtggaatctataatggaaacacttggcttctagggcagtaagtccacagtatgtcatttgcagttgaaatgtggagccagcatttatgtgaagcctcttggtcctcatctcaactattgtccactgtattttttattcataatattcccccttctttcataattctgaccccctctctctttaatttagctactgattttatttgtggaagttgtaccttttactcacttggctagcatttatttaataaagggatctggatggggcacacgtagcatccactactgacatggccacagtactgcctctctgagttataaaccaatgctctttcttgatttgcctaccaaaaaaaaaaaatagtagagaaatagccaaaagtgttagcagaagtaccaacaccatcactattactatttactgaacaacatgacattatgtaaaaaaaaaatcactctatcaactatatgaacagatgaaacaggatgtggggacaattagatgaaagtatcagtggcatactaaatatccgattcaaagagataagatgattctcattaggaagagacattttccaacgtgcatcttttctctccatccatcttttgccacagcttaatgggcaatccacaatctcattcccccaccccccgtaaggtaactttcccaatatctctttcaagggggcatttaaaatttattttatagaaaaaaatgttttatgtaacaattagacataaggattaaaagatagacacccgtagaaaaaagacagtaacttaattcacacgaaggggtacgttgtcaatgacagattagttcctgacaggtggacagcagagaaacaaaaacaggaaagtgggataagaaggagagctaagaagacatagggttgatttaattttcacttagctctgtttttgtcctatatctctttctgtatcaggactgctgaaatatttgagaaggacatgctcttgagtttagttgtgcttaaatcccaatgtcaagggtataatcactatatccagggaactgtttctggcctcacaaggcccagcaggattaaaggtagttgacacctcctttcttttcctaaatctagatacatcacttgcagtttggggtcctccctttctcataaagaccatgtttaggtggttaagaactgctttggagcctctggtgtaagctttaggatatgagtcggggttaaagaggagtctgtattcaagatcaagtattgcaaacattttctgtaaagggccagatggtaaatattttagactttataggccagagagtttccattacaattattcaactgcacattttgtaacacaaaagcagccatcaacaatatataagtgaacaagcatggctatgctccaataaaactttatctgtggcaccagaattggaattttatatgacttgcatgcaccatgaaataatattcttctttggatttatttcccgaccatgtaaaaaagtaagaaaaactgttgttagcttgctgactaccaaaataagcagctggccagatgtgggcctcgggtaacagtttgcggacctctgttctcgatcaaacaaaatttgaaggagtgtatgctctgacaatatgaaacaagcaggaagaatgttccccagaacttagaaatgtctgagttaaatcaattccagaaaagaaatgttttctcctctgaaaggatatcctcaatcaaattccaagctaagattttcaacttagtagcctgctctaatggacacataaggctcatttgaaattagcagcaatgtgaagtataaatagaaaaaaacagtttgttcttttaaatgatttaaagtcagtttctactctctagtttacaggatccatttccagagaaatactttccttcctaaactatgcaaagtccacttaagctcagccctgggcaaattatctcccttaagtcaggttgagaccagtgagtttttacggaatttcgtgcattcgcgagatgaatgaacagggtgcattcagttttacttgagcttcataagatctgcttctcccaggacctctttcttttttctattaaggaacagtttttcaaagccttatcaccttccttagctcagccttaataatactgtgtcaatgtgtctctgatctttactaatatgatctatgtaaatgatttgaacgctagaaactgatgaaatcccaatataaactatacaacagacctcccataggatattgaggcagcacaaaaaagaagaggctttttttttttttttttttttttgagatggagtctcgttctgtcacccaggctagagtgcaatgactcaatcttggctcactgcaacctcaacctccagggctcaagcgattctcctaactcagcctcccaagtagctgggattacaggctcacgccaccacacccagctaatttctgtattttttgtagacacggggtttcgccatgttgtccaggctggtcttgaactgctgacctcatatgatctgcccaccttggcctctcaaaaaagaagggtatctaagaagagccaattgtctcaaaatacagaaggtcggacagctcaaaccaagacccccagaataactgagggccaccccattatgatgcaagacatgttccaaaatgaaaactgaagctcagagcatcgctaacatagacatatagttttctaaatctgcaggacactgatcaataggaaaataccatttccaagagaaaaacccaaatatgcatgaaggcaaaagaaattttttgtttgtttgttttgagacagagtctcactctatcccccagactggagtgcaatggcgccatctcagctcactgcaacctccaccttctgtgttcaagcgattctcctgcctcagcctcctgagtagctgggattacaggtgcccaccaacacgcctggctaatttttgtatttttagtagagacagggtttcaccatgttggccaggctggtctcgaacccctgacctcaaatgatccacccaccttggcctcccaaagcgctgggattacaggctcgagccaccatgcccggccacaaaagaaatatgacattgttgtcctgctggtgttttaatagggacagcaccagtaggggatgcagtgaacaaagcctggcacttggactgcaatggcctatagatgtggcattgggtttgccattcccaggttctcagaagcaaaactttctgaggaatagtttaactgaccccatctctgtcattattcagaacaagcccctgagctggaaaacctcaccgtgactgaggttggctgggatggcctcagactcaactggaccgcagctgaccaggcctatgagcactttatcattcaggtgcaggaggccaacaaggtggaggcagctcggaacctcaccgtgcctggcagccttcgggctgtggacataccgggcctcaaggctgctacgccttatacagtctccatctatggggtgatccagggctatagaacaccagtgctctctgctgaggcctccacaggtatctctttcctttctatttatagcttctgtttttcccagcaggaaactgcccatgaataatcagacacgactagctttggaatggacttgttctgccactacttatgtctatggggtctaattgtgacacgaggccatcacgctacagaaccccaaggcaacttttaatacttcactccacatgaatgacacccttgggagttgtacagagctcaacctgcaggactaaacacacagctcccatgcagagggcctttagctccataaacagcctccctcctgttaaaggacgttaaggcactatatatgaaagggaaagaaaatcacaaaattctctcatctactgagggttaaggcaattctttaagatttaaaaaacaaacaaaaacaaatattttcctgcactttcctctctttgctccatttctaaaatttaaagagttgcatgatgcatgtttatctaaagaaagtcacattttttcagtaatattattattcagcttattcttgtgttaaagattccctggatcttgttgtgtgatttgatcactaaactagttctttgtccttctccaggggaaactcccaatttgggagaggtcgtggtggccgaggtgggctgggatgccctcaaactcaactggactgctccagaaggggcctatgagtactttttcattcaggtgcaggaggctgacacagtagaggcagcccagaacctcaccgtcccaggaggactgaggtccacagacctgcctgggctcaaagcagccactcattataccatcaccatccgcggggtcactcaggacttcagcacaacccctctctctgttgaagtcttgacaggtattctagacgaattcactaattcacttcctcccctttgtctctgctcgggaggaatcaaagcactttcttgctttaaactgggatcagctcctaccacattggggaaataccagtgaatcatctctgcttcttcctaaatgtcacatcccttatttggctaagtcctagttgtagcccagttccatggaaaattccacctactcctcctttaaaaaagtgagaggtggcttttctttcaaagtaagtttcagtcacaatatctaaaaagttggaaagcccaacctgtaaatgaagaaaaaatagctctgagctcatgagctcattttaagaacaccaaaggactccccatagccctatttgtatgtcaagaatagaaattgtgaacaattcctaaaactacttttcattcccaaaagctgaatagaaaaaccctggctttagtgccaacagtttgagtgtgctcaacacctgctgtaaatcatgcatctataatcaacactaaccagacaactcatcccaaccttagccaaaatgccatctcacctgaatcccagcgtgcaattgcctttttaagtaactcagcaactctgtgtccttatgcagaggaggttccagatatgggaaacctcacagtgaccgaggttagctgggatgctctcagactgaactggaccacgccagatggaacctatgaccagtttactattcaggtccaggaggctgaccaggtggaagaggctcacaatctcacggttcctggcagcctgcgttccatggaaatcccaggcctcagggctggcactccttacacagtcaccctgcacggcgaggtcaggggccacagcactcgaccccttgctgtagaggtcgtcacaggtatatgaccctcctcccagactggagacatgataggagccagcatgtcattgaaatagagaaaattcacccgtgtggcagaatcctaccccaatgttgttgacagacagcgtgaatctctaactcaggaaggtctgtgttggaattccacctcactagctaaatattcttgggactatatgtgtatgtatatatatagatacacatatatacacacacacaaatatatacttatatatatagtgtgtgtgtgtatatatatatatgtgtgtgtgtatatatagatatatacttttttttttttttttgagtcagggtctcattcttttgcccaggctagaatgcaatggtgtgaccatggctcactgcagcctcgaactcctagactcaagtgattctcctgcctcagcctctacagtagctggaaccacaggtgtgagccaccacactcagctaagttttttgtattttttgtagagatggagtttcaccattttgcccagcctggtctcaaactcccgggctcaagccatcttctcaccttggcctcccaaagtgctgggattacaggcatgagccagcgtgccctacctctattcttgggtatatttctttacatccctgagcctcctttttgtatctttaaatcagcaatgaaccctacttcaggaaactgtcgtgagcaataaataagttaatgaatgtcagtgcttagtaaagcgcccatcacgtagtaaatactgaatagcaaatagctaaatttatcatacagcaacagagtcatgatttttaaaatagcacaaacgttagggctgtggcacaaaaataagatcagaactttctagaaaaaccttattactagcctcagagccaccaactaacacccacctgataggcagatctctacataataacctttagaaatgatgcagttagcttctgctgaaactatctaggactctctcctcaacagatacaaaaagcagggacatttccaagaaaggacagccacctttgacttcaatgcttttcattcaatttgggaaggaaaaacaattcctctcaattttccaccaaaaatgagctgctccatctgttataaaaaactgtgctgtacatgagatttctagaaatagcttcaaaaagggctatgggaaaaagggccaactttttggtgatagggtttctgtgctgagccctaagcccatgccccactctacatatgctgccttttgataatgcaatccaaatcactcaattcaaaacaattgttttccttgctcttatataacagataaacttggtggttgctagaaactacataaaattccaaaaataagggggccaggttttattcctgtgttgcctggaatatcttcagatcaaacaagagcaaaaagggcctttgagacaggtgtggtctgtgtgcaagatgctcatatcttcctctgtagtccgcaaacttttgtttttagcagtacaactccttttgcaaatgaaatcttccaaggaaccctactatttgacagataagtgaacagctgttcttggtgtgcctggaagtaagagggggatacctccacccatgttctcaacacagttcttctagaaaagccccagatctatgtggaacacagtttgaaaataacccctcttaaaagcaagaggttgctcagaggttgctcagactctcacagggcattgaatccttggatacccaagagcaagtatctatatctttcaactatttttggttgaaatccctgcagatattctcctccctaacttctaacccatggccacttcagccttcaaaacagtggctgagagactgcatttaaccctcagaagcatcccacaaaacaatgggtttttccatatcctaaatccaaactttctaaatcaccaataacaactacgttaaatttcctttctacattgtagaagcagtaatagtgggttctgttctgcaccatttactgagaaaaatctcctttcttttaattaaaagtaggcacactcatttcacacaaacagctttgctctgtgatacagccattcttcctttagacataaagtacgagcagaaaaaggtggaagaagaaacaagctgagaacccagtacacaacttttgatccctgaaagctgatagaagaccaaagaaaaaacatcatacttgttcacacctgagacagcatacactttatcaacccaggcaggtagccagtggctagtgatgagataatctttctaattataaataatgaaataaagcagggatttctccctgacatgagtaagaaattccaagggaaaacacttgaacaatgatttctttattaagctgacacttattgggcactcgccatgtatcaggtatgatactaagaagttgataaatattaccatttaatcatcacgcaatcccatgaaacagtaccatcaactccatttaaaggtaaagagagggtggctcagagagaagctgagtgacatgcccaagattatgcagctagcaaatgctagtattgggattctaatcaaggactacttgcctccaaattctgcacttgtaaccattgctgtatctcttaccctaacccacaatcctacttttccatgtgaatttcacctgctagcaatgcatgctcccggtgggttgtgcattggtgcagatgtctttgccatctcaaggataaaccatgtagatatttccctttctggccattttcaactcctgaagacaactgtggccagggaaccacagttcaaattgcaaatgctcagagaccaagaattaaaaaaaaaaattatctttcccctttctctctttcctagagttgggctgtgggatgtttggtttcctcatttttggtttatagaactgacaaatacttttctgtccttcttcagaggatctcccacagctgggagatttagccgtgtctgaggttggctgggatggcctcagactcaactggaccgcagctgacaatgcctatgagcactttgtcattcaggtgcaggaggtcaacaaagtggaggcagcccagaacctcacgttgcctggcagcctcagggctgtggacatcccgggcctcgaggctgccacgccttatagagtctccatctatggggtgatccggggctatagaacaccagtactctctgctgaggcctccacaggtacttcctctccctgtcaatgctttctccccaaggttctttgcttccttttcaagagatcatgcgcggagtcagcatctcgccataactgaatccttttcatgtgcctttcagtggccggctgtgcatgctcagagacctccctgtgggctatgactttgtcctcatgcctttgccatgtggatggtgaatgatgcaggtgttgccctttctgatctccagccccccagcctttcatactttacctggctgattctacatcttttttgaatgatgaatttttgtttcaggaatcagcctgatggttttaattcacttctccagtgcttggagataactaaaagcttccctccctatatatgagttctggtggaacacagattatttacttctgagagtcttttgctagttggaaatggtgcttttctatctctaaatccctcaaggatatgggtagtgtggttcttgcatgtaagaaatgtttctttaaaatgcacccagtataataagagaactgaattaccctcctccgggcagttctctcagatactgagtcattgttagaacatcaaattagcaaatagctagaccagaaggaaaaaaaaagaaattacacaattatgactggagactgtaccaaagagaaagccattcattagcacaagtacacacagcagcttttggaacaaggaatgtcctgggctatgaatgtcaaagaactgataccctttttgctcttttaatcaagagtttctctctggagtgttggcctttggatggcaaactcccagccccagacccaggagggtgcattatagtttactcgtcactctacccctgttacaagacttcagtgtttcccgggggcctgccaaagtcagcagccttcctctgacacagttttccgttgctcatctttattatgtgcctccatgggtttgaagctcggtagagactatcgcttcattttgcatatgactgctcccctttttaaataattattgcaactaaactttaatgcatacctgtacatcccagttgaatctagcaagagcatagctctgcattttaacctcagtcatttcactaattttcactgagataaagaaacataaagcacaggcaaccactgccaggacggtgaccctgaaatgcctagaatttgcagccgaggctactctgaaggcacccggacctcctttttctgagacccataaaccatcccttcccagaaggcaaagtaatcacccaccacttctgatcttttctgcagatcttgtggcttgggtgtcctcagtatttttatgtgtgtgtgtttttcttcttaacaatagcaacattcttgccactgatgaattggcctatgggcaggaagttccataatcccatctgatctgtatctcaacaaatctattagaaggatctcagagaccaggagccttctttcttgctaaagagacagtactagcttttcaaaccctgctcctacctgccctctgcatgttttattcttatggttggggaaagcactggcaggaccatcttcaagacaaaatgttatttcttcgctgaaagggatggcctaaactgccttgccttggcttagccctcttggttggcaatgcaatactagcctttttggcccacatagcagcagttaagagaggacaagctattttaacagaatatgagaatggctggctggtccttctctaaagtatgaaaaaaataccaagaattacactgagaaattggtaattaccattaagtcacaaaatcagaagcctcaagttaccaccttgggaaggtaatggcatcagaattatttagccctcatttgaatagatgggagctccttcaaagtaaagaatgtctgtggaaggcatccaagtaatcttggtttccttaatgcaattcaagagactggaagttgccaggactcatatcttttgaccagtggccagcaaccctgaggtagggctcccagaggcaagtgtggttaagatgcaacagttcctgataagatcattcagcacatcttcttggccagggcctgattatatgtggcaactgcatgtagagaaatctaattgccataccttcctttttctaatttcttttaacaaaactgctttttctctccctttggcactaattggtaacattgcttccttccatcatagccctgaattatcagatctctctacccagcaatggttctattaacaacctcaatcttaaaacacagccaaataattaactcaaatttatttttttcttctcccctaccccttccttttacagccaaagaacctgaaattggaaacttaaatgtttctgacataactcccgagagcttcaatctctcctggatggctaccgatgggatcttcgagacctttaccattgaaattattgattccaataggttgctggagactgtggaatataatatctctggtgctgaacgaactgcccatatctcagggctaccccctagtactgattttattgtctacctctctggacttgctcccagcatccggaccaaaaccatcagtgccacagccacgacaggtacatgtgcattctcccatttctaacgcactctctccacagtcttctttgcagggtgaagcctctccttctcctctcccattgatgtacaagccacagggcactaactcttccatggtgctaggctggggtgctgtttaacataactcttttccaacagcagcccaaataatgcattgccataaagacatgtgcctgatttatcactgaccaggatgtttacagcataaaatgtagttcagtctaatttgccatatggaatctagagaaaagaattctaacctctcataactaaaaagctatataactagacctgttcttgactttgaaagatgtctgcctcagtcaaagaggtcttgtaaattttattttgtattatcttagtgtctttgtcttcctagtctcttggacctcgcaatacccaaatatcccagtgatttaataatcatgttgatggtgttgggtatttttttccaactgggaaagtaaagggaaacagcaaagattacttatcagatgagtgcaggaggcagccatgccattcagaccaccccagttccaacaccacctctagaagatcagaacatgctgtcttgccctcagaatagtgaatgataaatggcaaaaataaaagtagaatagttgtgttcaaacaagggacttagtttaaaaaacaaaagaataaactgctctcactttaaatttgtggtgtctgtgagatgtgcactaagtcagatgctctttgccatgcagtaaaagacaaccctatgtgaatttagaaaggggagcccccctttctaatgctacattcaaagtagcattcttagcacaatttagacagtgccttctctggagaggtaaatgaagaaatcacaaactagaaaaaaagaaacaatatctacagaacaaacacaggagaaatgaagaaatcacaaactagaaaaaaaaatattgtctacagaacaaacacaggataatttttccttatagtttacaaaaaggggactcatggtctgggaaatccaagaaaagggttgacatcgtagcatcaaaattgcctgtcatttaggtcacccatggttgagagagggtctgtcctcattctacatgaggctacaaattgtcgtcagggtgatccatggataaggcagagagagccaacattatccagttgctatctcagccaggttcaagtataaaaaaacttagaggagaaaattaggcaaacatatatgtttgtttctcatggctcaaaccgattttcaacaagggacaaattattttaccattaacaaagggtaaagtctaaaactttatggatttagtcttatgtgttttgattttgactctacaatggtgttttaaattgacacactttcttttttcttttttttcttgctttagtagccaaacctcttcttagccacctcactgtctcaaacatgacctggggcagtgtgtccatctcgtgggaagctcaggagtctgcctttgatagctttcttatagaagttagtaattccgatcacccccatgagaccatggtgctgtctgtgcctggggtgtctcgcagctctgtcatcaccaacctcaaagcttcttctaattacactgcccaccttcatgggctgattggcgggcagcgtgctcagaccctgatggtccaagcaaccacaggtatttcctattatggcttcttcactcttcattgaatttcctctgaatagctttccaaaaatcacccgctacccacttttcaccctcctagttgctcccaatccttctcaaatttgatagagccatccaaatcaaagctttaaagctttaaaataactctcaccccaaattaaagaatttcagtgtcaaacctctttttcctaaatatccattcacatctggagttgttctgtttgtttgtataaagttaacctgacttgctttggttgaatttctaaatcatcttttcatctgatcttgaataatctttttcaatcccacccattatcatctgcctgtggtcgttctaatcaaagtttgcctatgtcatgttcaaagaggtatgtgcatgccatttctggtgacttggtcagaaagatctacactctttttctctctagcaggattttaaaaaataaaggtgccctgagcatgctgagaatagactctgaatcacaacccaagaattgcatgagaggacccagtagtcttatcttgttctcgtgatttttgtctgaagactactcttttttgacatgtactttgtcaagcacattttgtcacccactgatagctgtcacaaagtctcaggctcttctttcaagccatcatcttgtccaaatcttggtgcatgtggtgaatattcagagcattaaattttgaaaatgtttctttttcctggaagcagctagcatgtccatgagtcatttcagaaggtttaaagtggtgggagaaaaatgcccctcattttgcatggaacattgaccataccctaactaccactatctttctctgttttttcttgcatctcatttctcagcttggttgcaccctttgagaggcagctggaggtaaagctgacctcaagaacctgagtcttattctgcatggtgaatctgttggcattgatagtctgtctggtagcatgagaagaatcccagcatgcatccttaatttgggagattgtttctacagcaaaatatagggaaataacagagttccacttggaacattttaatcttttgtgtggttgagggaatttgtcaaagctatagctgcaaatgattgcattgttaccttctgaaactaattgataaggaggatatcccatgtcaatgctaatggctatattctgcttctgaaccaaatcctttttgttcttagagattttatgacatcgaattatgctgtataattgtgccattaaagtttatccaaatgagccccttctttcctccaaactttggagctgaagcaaaataactcccaagtccttggaagaaatattgtgcctcttcccaaccctaaatcctgatcttaatatctgaatcctccagtactgttgcctctctctaaaatacagtctgggccgcacttactttaaaattagttttatttgataaatgagcatttaggaggccagccccataaacatctagccatatagaccccttaacattaaatgagttgctctcaaaactgaatgtctagactttaacagaaaagagatacttaacctcagggaaaccatctatctgtccaaattatccaataattgagtttcctaagcagaaaattcaatgcctaacttcaagtttttctttcacctttgcattcactgggaattttgaatggaagccatcttcacctttacggtattaaatggtaaaatatagattttcctacaatgcatattaagtactgtaaaaatttctcttgtatgggtattagcctttaatttgtgcaaacagtagatactaaaaaagaatactaaatgaggaaactccaaagaagcattttctaaaacatgttcaatggaacaccagctccttgagatgttcaaaggatattcctcagatagggtatacattgatcaataagtttatgaaatttgggccaaacaaaattaaacaggtttactgacagaaccagcctgtcagagcctttaaaatgcaaacccaccttgtgaatctctatggtaagacataatattcggtgtttaccatgcatacttaatcataaagctgtcttttcttggaacatcttacagggcttgtgtccccagtacaaactttagaaaatgtagccttaatacccttcacgttactccaatctaccactctaatggcttgtctactcttcttcatacatgactagcaaatggtggtgtttatgctttaaaagaacacagatctaaaaaataaaataaaaataaagaacacaaatatacacctgcagagaaagcaatatattttctatcatcatattcaatgcaggtgtagacacagcctaacatactgtctcttctgtatgtatttggagatattgatgctttcatgttctatggctacattctggaaaaatccactgcttcctctaataatgtctctctctttctctctgcccatattccttctttagaaccaaagccacagttgggcacgctaatctttagcaatattactccaaaaagcttcaacatgtcatggaccactcaagctgggctttttgcaaagattgttatcaatgtgagtgacgctcactcactgcatgagtcccagcaattcacagtctcaggagatgcaaagcaagctcacatcacaggcttggtggagaacactggctatgacgtcagtgtggcaggaaccaccttggctggggatcccaccagacccctcactgcctttgtcattacaggtactcaatcagaggttctcacttgtctaacacagagagaaaaggagataagtcatcttaaaggaaaattcaacaaaaatacaatcttcactgcaaatgtgtactctcttatttttaattgacaaatagtaattgtatatatttatggagaatagtgtgttgttttgatatacatatacattgtggattgattgaatcaacctaattaacatatcaatcacctcaccttatttatttatttatttatttatttatttatttattgtgctgtgagaacatttaaaatctactcttttaggaattttgaagtattcaatatgttattattaactatggccagtcaccatgctgtgcagtagatcactaaaacttattccttctgtctaactgaactttgtactccttgaccaacatctcccctttcttcatctccccaaccccagtcaccggtaaccaccagtcttctctgtgcttctatgtgttcagctttcttagattacacaaatgagatcacgcagtatttgtctttctgtgcctcgattatttcactctgtacaatgtcttctgggttcatccgtgttgttgaaaatgacagaattttcctcttttttaaggctataaagtattccattatatatatatgtgtatatatatatatatgtatatatacacacatatggaatgtatatatttatatataaatatgatctatctatacaccacattttctttatccattcatccattgacagacacaggttacaatacattactcatgatagccaagataatatatgtaaacttctaagtaaagagaaagcagatactattataaaggagaggactttcacagctgctcttaggaagtggagagaacgttctcaagagttgtataaagcttttagggttttttgtgcccagttttattggctgttttatccctagtttagagattctgcctaaaaagtgactcctaagttagtaaaggcctaagatcgaaatcctgttcataaatcatgctaggtaacgcagttcatatatgtgacaaaagtataaccatctttttctttaaaaaataattattcttaaaactgacaacacagatgcagctagatgcagctaatttgaaattcctgtctcctttttttcttttgattaaaaaaaaaatgcatttaccagtactgtcagaaaaaaaaaaaaaagaaaaaaaagaaaaaagaaaaatcacctagaaaagagacgctgaaccttctccactaatcctccttatccctcaggattgccatcactgattggggttggctttgggtatggaaagaacgtagaacttggagtcggaagacctggttgtatatctcagcttaggcacctagcagatgtatgacctaggataagtcattaacttctctggtttttttagatgtgatcggggttggaagattgatgaaggttcaacctcagatggcagataaatttcaagtttaattaagccctacccattcactcaacttgacttcttgaacatttgccaatgttcaatttggcaaatgctgccaaatggtggcagcaaaaacttcaatggcaaaggctgcacatggtgtcagtttactaaattctagcccaaaaagcctcagaaaatatttagaagtctcttccttttcattagtgataattttcagaagacggactttgccatctgattttcacattaaaccaggtctctcccagggtctaaattgccatcactaagacatgtcaattagtacaattaaatatttaattataggcagcatggtgtcctggaagagtgaggattttgagatcaagcttttgtggtttctaaacctctcccacagctttttagctacataattttagcaagttcttaacttgtttgaaccctaatttccttatgcatggagagaggataccacaggcacttctgggagccttgtctcatagattaaatagagttggtgaaatttaactgcctagcatccagtaggaattttatacatgctaggttctttctgctgtctcccaacattattaggaaagtggctttcttaaaaataaccaataaggctagatagaacaatagacctatgcaatcatgaactccctctcgtttttaagagaactttggatgtgttttaatgtaagattaaaaaatgagtattttttcctatccagttacctaatgtgaattaaatcattcagatgagtcttcaaatgcagaacatggtaatttcttaagggactgagacaaggaggaacgagatgagattctcactcctcaggaggggagaaatggccacagatcccatcaggccattgcttgtagcggcttgcaggacctcccacataacagaagaaaaggaagctgagagacccagtcttgggaatcctagatccagttacagcattgtctcagctaatccatgatgtgaaaagattgcgttttaaaagaagcatattaaaaaagaaaaaaacaaaacaggagggactcttaaataacaagcccttgattgcctaattagcctgaatgccctcactttcattggaattcactgctttgatggtgtggaggtgcaaagaggccagctatcaaagagagatgccacttatctaaacaaaatccaggaacagaattcgagacccttgtctctcagatgaagattgtttgcccagtataagagatttcatcctcgcttttgatagaattatgattcttgggaaatctttacgtggaaaaaactgcctcagaataaacaccaagtgtttcaaaataactacaggaagtccaagccacagcaaaatttaaatctctatttacaaaatgaaggtattcattcccttattcattcagtcaccaaacacttctttttaaaacatttttctttatgtctcatggattagaccctaggcattagtgaattaatgcaagagcatttatctctttgtaagtttccatttagctgtaatggaaaagaagtgtctaaactagatgcagctaatttgaaattcctgtctcctttttttcttctgattaaaaaaaaaaatgcatttaccagtactgtcagaaaaaaaaaaagaaaaaagaaaaaacacctagaaaagagacgctgaaccttctccactaatcctccttatccctcaggattgccatcactgattggggttggctttgggtatggaaagaacatagaacttggagtcggaagacctgattgtatctcagcttaggcacctagcagatgtatgacctaggataagtcattaacctctctggtttttttagatgtgatcggggttggaaggcaggtagcaatatctaccttactgtatcattttgaagactaactaggataacaatgtgaagccttgtcagttggcaagtatcaatggaaacttagccaacataagctcactccttttggatatcccaatgtgtgaaaaggccctttagcacctgagaaatcagaatgcctgggacatacatgtttggtgaacgaatgaaggagagatggtgacagaatttactaagacccagatgtgttcttgttttctaactttatccaggaaaataaacagcaaaagatttagcaaatcttatcatttcttagtgggttataaccatgagctattaattttgacacaaaaaaaacttacctcctccctttatttcagcttgtgaggatatctcactaattgacttcattaatttgattcaaactgtgcactagaagtgggatagaaacacatgaagtataccggaaagaaattatactcgaaaaaaaaaaaaagagctgaaggcagtgggaagtagacaacgggatccaaactcaacaaaatgcaacctatttgtataaagaactacatggcctttggagtcaaacctgactaaaatcttcgctctatctcttcttacaagcttgtaactttagctaagtcaatcaacttctttgaaactcagtttgctcacgtgtgaaattagaataatacctacctcatgggctattaagagaattgcacaagataacactatctggcacccaataagttcttactgaattttcattttctaagcatataacacaaattgaatgatggacttgggtatctattggtgttcttggaaacgtgtgctatcctgacagagtcagtgctgctaacctgagttattttcactcctcccttctttcagaggccctgccccttctggaaaacctaaccatttccgacattaatccctacgggttcacagtttcctggatggcatcggagaatgcctttgacagctttctagtaacggtggtggattctgggaagctgctggacccccaggaattcacactttcaggaacccagaggaagctggagcttagaggcctcataactggcattggctatgaggttatggtctctggcttcacccaagggcatcaaaccaagcccttgagggctgagattgttacaggtatttcaaatcaagtgagccatttgttcctcttcctggtccccttctgtgtaatctgtctaccggatcgccatgactttaacatctttgttcacattccctacttaatccataaatgtagtctactgtttcaccttctccccacactccctcttgtcatatgtacttaatgaacactccccactcccaccccagaaatgagaaggtcgaaatatttctgctttgtattcaaaatcctttagaccttgtcttgtccatagctcttgtgtgcttacctcatatcatcgtcccttgtgatcaacctggctggtccccagctacatttcagccttctcaaaagaaatataccaatgagtatatttccaaaacgtatttaaaacttttgccatctcaaaatctcaaccatgatcttaacaaacttacccagtgggctcgtcattggaaaaccaaatgtgaacttattttatcggtaatcactaatatcagagagactctgcaacacggactaaatccataattttctcaagactaatgattcctacagaaattaacaacggaatagtcaaacatctgtgtttcccaaagtctttctagagattactagctccacagaatgttcaaaggtcctactcggtgaggaaattccacgttcaaataagtttggaaagactgagttaaacaaagttaaagaggatctttaactgcacggcttttcagaacaccctaacgtgcatcatctccaagaagtacttatccaggcagtattttccaaacttatttgacaaaggatactttttaaggaagaggatcaaacaggaatagttcactgtgagcacactttgggaaactcagctctaaatctacattgacattgagttttgtctagttaaggcaatgcaagatgaaaccctgggtccacagtatgtagcacaaaaggttccaacctcagttctaccatctgaacatttatctaatagttaataaaataacaagaaagaatgcaaaaaaaaaaaaaaaaagtcaagggtaggagccttctttagtgaaacagcactaagaacaaagcaaaaagaccataacattttaaaagccattttgggcaggctcaaggagaatgtaatcagcagtatcatcatgagcagctctacagatcattaatgctggtttatttgtcttttcaaaaagaaaagaaaaaggtcttgcaggggatgggcactcagccactggaagacagagagcaaatgtaaacaatttactggctttgaacttatttaataatatgtgggacgggccaatgctgagtccagatgtggatttactgaattgcttttagacaaaactcacatatgcaaacatatgcttgacttgtattgaatgtgtctactccatctttcccctctcctgactctactggacttgttaatgttgaatgattttatttttggtatctcaggacacttctatctctgaaagccggggcatcactacatattgatacccctactggagagaagattgcacggactggtaaatgatgttgtctttcctccttctcccaccattttctctccctctagaagccgaaccggaagttgacaaccttctggtttcagatgccaccccagacggtttccgtctgtcctggacagctgatgaaggggtcttcgacaattttgttctcaaaatcagagataccaaaaagcagtctgagccactggaaataaccctacttgcccccgaacgtaccagggacataacaggtctcagagaggctactgaatacgaaattgaactctatggaataagcaaaggaaggcgatcccagacagtcagtgctatagcaacaacaggtactgtaaataaacaggagagaacagagaaaagtcatgactcaggggtcttcttctcacagggctgagtaatcacaggagctttggatgcaggcaggctggcgctctgatcctgactctttcaattacagactgtgttaccttggacaatttggctaagtccttatgcaaaaaaagtatgatgccatttacttaatagggttgtgaggattaaatgagataattcatataaagcccatagcggaaggcctggcaggtagcaagggcccagcaaatgagagctattcacgttgccattaatgcatcatcatcgttacaattatcatctttttttttttacgttccaaagattcttccttctatctattatctcatcatatctcatctcatcatatcatatctcatcattttatccagagatacacttccttgttctttggccaaatgttcgagctataccaagtagggagataatggagaagcagcacgtctatctatacacattaatatttataaaatgctacatgtgaataatcagtacggtgatcagcaaggataaaggagagagctggcaagattaacatgctactgtttatgaagctctctaactttgatactcataacaactctgaaaggcacctagagtgtccttggagtttaattacctttttccataggagctgtttcaaggagaaaaaaaaaaaagatggttaataatatgactcttaggcccagagtgatggctcacacctgtaatcccagcatttcaggaggctgagacaggaggatcacttgagtccaggagtttgagaccagcctaggcaacatagtaagaccctacctgtgcaaaaaaaaaaaaaaaaaaaaatcaaaaacttagccaggtgtggtgcctcatgcccgtagtaccagctactctgcaggctgaggcaggaagatctcttgagcccaggaggttaaggctgtggtgagctgtgttcgtgccactgcattcccacctggacgacagagcaagactctgtctcaaataatgataataataacagtagtaataatatgactctttgtaataataataatactaagatgaacatgactttttaaagagaaaaggaaaaacctccaacaagtcaagtaaattatttcatgaaactgagggagatgcagagacatagcattcgctggagatggctgcttcaaagggaaccaggggacagaaccacaaaatcaccaggagagataaaagggacctgagagatgatgtagctcaacctcttctgtttgtgcatgaagactctgaggaccagaatggtgaaatgatttttctatgatcatagagctagatttggagtaaagcccaatgaccagcttattctaatactatttaaaatgagcagtctggatgagagaaaaccaatgcatatagctacttgccatctctgacaggcataggcatgacatttgccaaaacctctcctttttgtctaaagatagatattttatattgttaagttttcaggacctaataagtggcaagaaatcacccatgtaaaaataataatcagtatttgtaggcttggagaaaatgctagaatccaggcagcaacctagtaagagggaaaaaccctgtttcttattaacagggacaccctatcctgggatgcaggtctcagtctcctcctccctgtggctgcccataaaacgactccagatcagaggcagagccttgattttgatcttggtttataaacagtgttcttcgaagtttacttcttctgatcattgatttgttttgctgatcttttttttctagaagccctgcagttctaaagcaaaaaagagaatgaataatcatgaattgaattttttttaagaacaacaaaaaaaaaaggcaaggcagaccctgctcttttggaaagccctctctttgattttcttctctagagcctagtagcttatagccaaagagaggtgcccatgcgcgtgcgtgcttgtgtgtgtgtgtgtgtgtgtgtgtgtgtgtgtctacatgcctgtgctccaggaccaggagaagacaggaaagggggctcttgagcacagaagatgcctaatttctatcttcacctcatcaagtttataaatttccccttttgttttttttttttaatcctttctcctctcctctcttcctccctcataccattgtaaactcttctctgtaatgtcctatccctcttcctcctgagaaggccctgctgtagctcctcctctcactcacaaggtacctctccatagcacaagctgccagccctgggtgcccagggcagtagaaagggcagtgggagacagtgttgcctggtggttaagccaacaaccatgggacagtgtccttggagtttcatcatggctctacctcaattccttcatctggaaaatagaatttaactcaaaggtcagccacgaggtttacataagatcatgaatgtcaagtatttagcagaatttctttacccacagtaaccatattagctattaatgtgtttggccataagatacacctactaaaatgtacctacaccaatgaggttttcagtcaaagcaatagtgcgagtacaccaggttggcagagggaagtcctcagtgcctgagtttatacacctcactgttttttgtttgtttgtttgtttgttttttcccagttagactcatctcgatctttcctaggggacaccttaaagtctagtatggcccatggaggaaagagggacattggaaagaaaataaagagagggcaatcatatttactgaattctcactgcatgccagatgctgtgctgggagtttcacatttgttatctctgctaatcctcaaaacatccctgtgggtgggtaccacttttccctctggacagatggagaaactgaggttcacagaagtgaagggacctgcccaaggtcacccagcctctcagtggtatttggacaatgaagctctttcaggctccagagacccatgtggtttctgaaactttccatgggcagggcaaaaacccaggcagccacagagtctgggggtggctaccaggccacagaagaaagctgtaggaggagatgtcttagatgagagaaaaatgcagaaagaggaagaaaaaaaaacccttgctgaatttctgtgggtttcagcatgtaataatccctgtgggttggagaggggaaaagatgaggaagtgagttccctagagcctgaaaattgtttcctgaattctctgggtaggcatggttagctgaagagggcaaaaatcgcagccaaaaaatacacagagaaaagccaaaggaaactgggttttgaggggaggtattttgggaggcagaaactccccctgggcatggcttttctcacaggtagacccagcgtccactgggtgtttgctttggtgatgagcctgaggttgttctcttggctttggacctccttccagttctaggaatgggtttgcccaggtcagtgtttgtgtgaacgttatttccaggattccaggctgtgcttggctctgctgcctactcctgggacccagaaagatcacatcacaagaatgttcatggaagccttggtttggttctctgtaaaatggctataatcacatctttttgggggcttctacaggaggattaagccttataaattgcaaagaactgtacagttgtcaagtcttagtattatttaataaaaggaactagaaagcaaagatttaagaaaatgttaaaaatcaaaaatgaacgggggtcacattccaatctgggaaaccattctcccacgattccttggaagtcagctatggtcctatcactccccttgaattagaccaaatgacttttctacaaccctgggccctgtacctgaaatgaaacaattggtcctagcaagtcacaacttaaccacagatcaccacattctccatcctaaaggcttggctcagacacaaattctaggcactgagttttcctaaataaggaattcaggaagaaccattgatgaacaagacagttaactgtttctgggcttctcttgtgctttcttcttgacagccatgggctccccaaaggaagtcattttctcagacatcactgaaaattcggctactgtcagctggagggcacccacagcccaagtggagagcttccggattacctatgtgcccattacaggaggtaggagactcggaaaggggagagagaggaggagtgttgtgggtttggatggattcatgaaaaagaccctgataattttcatcctctaacatcatgatcaaagaaaatgaattctttatttgtgagaccatctggagagaagagaactcatttgtaaagtgctatgaggttcttagaagaaactttcttgtgaagggtcacttgaacaagaccttttttaaccttgaaattataaaattctatgagaaatagatctctagtattgtttgcacacaatggcaaaagattctaaatatattggcatttctctccctgcgcacactcatctgaaaagctagtcttggatatatgtgaagttttacctttgggtaccaaatctgtctgtctcagcaaatgatggcaagctgtgccttagaaaatttgtgagttctaactcaaagcgcatgggctataatagagaccacaaggaggaagcccagtcaaatctgcctaaagacactctggcaggtagtaagctacctgttgctgaaagtgtataaagagaggatggttaataacctcttcacaggaatgctgttttgtctctataggaagtctgaccagctgatgtgcaagttcttcactagcccccaaattctaagaaatacaatttctgtgtttattaataaacactgcagcacaaacttgactataatcaactttcttttcttaagtagaatttcctctagtaagggagtctataatcctaagccaagacaatgggtgcaatagatctgacatacattacatagtaagcttcccatattgtttgtggggaaaaataataagataaaatttgcacaacgtgccagctctctactgaacggaaacttgccatttttagtacgttgtgacttcatgttttcccccgcccctcctggctttgtttttggcatctgcaccaatagaaaaagcatacaaaaagtaagccttcttcccttatgccagagggtaggagcaaatgagaagtcaagaaagtggtgtttgatgaagatatagtttcatttctaaatcagatacactctttttgggggcaacagtgaataagtgtcagtgaggttcattattcctcatcttgcttttactgtgttccaggtacaccctccatggtaactgtggacggaaccaagactcagaccaggctggtgaaactcatacctggcgtggagtaccttgtcagcatcatcgccatgaagggctttgaggaaagtgaacctgtctcagggtcattcaccacaggtgagttggtggggttgtgtgtgtgtgtgtgtgttactatttttcagaggtcacttgtgcatcctatgccatttctcaccttcagccttgtagctcatgactcagcagctggaaaaaaaggggggttttatttatgagatcctagtggaaagtgaactggatttagagtgccagaggcctctcttctggcccatcccagcctctggtgagctgggtgaccttaaccttgttgggcctccatttcctggactattgtgaaagaaaaagtccaagtttgggagtcatacttacctgaatttaaatccaaattctaccaactacatgagctatcagtccattttactagggtccactttccttctctgtaaaacagacacaattctgcttccctcacagggtatggtaaggatcacatgaagctgtgtttgtaaagcatcctgaaatacaattgttcatgttagcccaccatcaccttcacctccccgcctattgcctggaacccttgtgagtgtccctcaaagcaggtgtttcacatgagcatgtgatggtgacagctacaaaacagctcctctctatttggtggctcttgcattccaggcactgttactaaacccttcacatttaatccccacagctattatcatccccattttacagaggagacaactgagacaaatgaaataccttggccaagcccacataattagtaaatgctggaaccaaatttgaacataggtcggtctgactccaaactctctatccttctaaaataaagagttcctttcctagtgtaacctgatttgtacagtacactgtaaagaggggaaaataatgaattgcattgaaggagaatgaagtggaaaatttctcttcagacagccatgtctcaaaacaatttatcctttgatatgtgagcaattatccagtccaactcattaagggatacaaagaatagacctcataggaaattttaaaaatatcctcatagcctgaaagagttgacaacacacaattaaaatatcccatctgaacccagagtcccgtccaccctgcctcacaggcccttatttccccaaagaaatctttcatcagtggattctccacggcaacagatggcaaaagctgaacgtagttcctcccaatgccccattgtcatcaccagttaaaggagattctgtccatgcacagtgaagcaggaaggaactcagagtggacaatgtgggctccccagttgccctgccacatcctggctctcagaccagtcatttcatccctcaaggctcaggtgcctctctgtgaaatgagctgaggatagcttccctccaccctcgccagggctgctggcatgggcacaattgagtagtaagtgcaaaagcaagaggaaatggtcagattcatgctggcttctgagaaagtgatgttgggtagtaggagaggtcagttaaaagaggccagggataaatatcctttgaatatccatcctttctcagaacaagtcatttgaaaaccatacttaagacttcaaatacctttaatagagatcttaataacaactgcaagtattgagagctttccctagtacatcttacacatcacacattgcttagctagtctttattaactaaacagtcaccctttggcagctgaagaaagtgaagtttggagaagggaaatgaattttcccagggcacagaggcaccaggcagagaagccatggtagaacccgggaccaccggcctccagagcctggctttatgttctctgcaagccatctaaggagaaataccactcaaagctcagaaaaggctcggggccaggtgcggtgactcacgcctgtaatcccagcactttgggaggccaaggaaggtggatcacctgaggtcaggtgttcaagaccagcctagccaacatggtgaaaaaacccatctctactgaaaatacaaaagttagctgggcttggtggtgcacacctgcaatcccagctacttgggaggctgaggcaggatcattgcttgaacccgggaggcagaggttgcagtgagccgagatcgtgccactgcactccagcatgggcgacagagtgacagtctgtctcaaaaaaaagaaaagaaaaaagcaaagaaaagaaaagagaaaagaaaagaaaaggctcgggcagtcttaactatgcaagtcccctctgtgtaagttctttctctggggaaagtaatataaacaataataattcttgtcatgtgttcagccttgttcagtttacacagctcctttccacccataatataatggaaaaatcaaaataacactgaagatgaaaccagccagaattactatccctattttacacatgaggatatagaggcccaaagtaactgagccagcaagggagggagtcattactcaaagccaggtcaggctggctccaggcttaggtctctgaaccattccatgcagctgacactgtcctaacatcaggactccataagcagtgtggacagcagagcagctagagtctgatgtcccacccaatgacttccctcctgtccaccatctttctttgcagctctggatggcccatctggcctggtgacagccaacatcactgactcagaagccttggccaggtggcagccagccattgccactgtggacagttatgtcatctcctacacaggcgagaaaggtaaggttttgtccaagtctctcctcactctaaggagtgtctttcctgctgtaaactcttcccattcgctcttctccctgccacatttggtacaggatgataaaaatgcatgggtaggttgaaaaggccagtaatgttcatgtggctcccaactgaaacctcaagggagtctggtaggtcatttaaaataaaaataaaaatacatctccagcctctacatgttttcctggcccattcctcctctcctgttagtatctctgcctaccagtgtgagacaccccgtttaggaaacagttgtcatcttttacaaagaagaaaaccagaatctaaaatcttaaccagaccgcttcaggccatactgagcagtctcaacttttcagagaccacaaaagaagctagttttagcagatttaattaaaaagtctgaaattttaagccaggtacagtggcttacatctgtaatccagcactttgggaggccagggcaggtggatcacttgagaccaggagtttgagaccagcctggccaacatggtgaaacctcgtctcttctaaaaatacaaaaattagctgggcatagtggtgcatgcctgtagtcccagctactcggcaggctgaggcaggagagctgcttgaacctgggaggcggaggctgcagtgagccgagatcgcaccactgcactccagcctgggtgagagagggaggctctgtctcaaaaaaataaaaataaaaaataaataaataaataaaacagaaatgttttcttgtttggcaaccatcagtgctaatgtacccagttgacagattaaacacttgtttagagcaccagcaaactacagctgccagaaagtaaaatcaaatataagtaagagactggagaaagagagagtgcttttcaatgaacccctccattttgtaatgagctactctagaaataattgtgtaatttcaatttccaggtataggtaagtttcatattttatggtttggtattgttttgctctcagtgacaatatgagcaggcaccagcgtctgtgcctggagcctctgaaaattttcattcagttatggtaaccaactaagagaggtctttttgaggacagagcacaggtaggggtggggaactgatggggaggagggatgttgggtttattctttttactctttaattcttaaatagtccctgtgagcaaactcttctgagtcaggaaagatggtgttgcacctaaaatgaatcaggtatagttcatgggaaccatggagattgtagattcagggcaaacaaggggcttggttcagaagagggggtggtgctcacaaatgatgaggtaagttgaccaacttgtccccgcttgcctggtactgtctcagttttagcaccagaagttccacacctaggaaatcccgcagtccctggcaaaccaggatggttggtcacctgtgaataggaaataaacacatgcccccaagcaatgtgatcagtattgctttccaccactggacatgacccagcaggcctgagagatagtggccaggctctggtgcagctactgctgtccagtttttgtgacccctcagcctaatgacttgatgacacttagtaaattataaaagggcatgtgaaaaagtgacaaagagaggagagcatgcatcaggacaaattaagcatgggcagcaggcttggggatgtcccctccgaccgtcctctacctcggtctcagtggcaaagcgattccagccagtaccatgtgggaaaaaaatctcctgacccccagttccccttccttctgatttggggcctggaaaaattaagtctccatatgagaaatcctttacgtatgaggtgagtgctcaagagagagaaagagagcgtgagtcatttcagaaatcagacctgcttttccgcagggtcactgaaagtttcgatgttcgaaggaggtgtgtatgtggtttgccaagcccactcatggctcagacagtgagaggtgactgccttggtatgtgtatttcatgtttagtgccagaaattacacgcacggtgtccgggaacacagtggagtatgctctgaccgacctcgagcctgccacggaatacacactgagaatctttgcagagaaagggccccagaagagctcaaccatcactgccaagttcacaacaggtacaaagacactgagagctggaagctctcccttctggggtgcccacccacagcctgcatcttaaacaggaaccgctagccagttcttctttcttaagtcagggccttgcaatgtgattacatcagcatcacttaaattcaccagtgcccactcagtcaaggcctgaagaaacacactatttccttttgaactgaaatgaccttggtctccccacggggaaggaaaagattttaagaggagggctttgtaagtggaaaaacagttcccactggccctaaacctagtatttaatgatccacgttccaggcaggaaaatatttttgaagaggcatattttttaggcaatttttcctagatgtttgttaggtttctatacattgagagctttttacaaactatagcaagcagggaaacagaggaaccatcctctctgtcagggtgagtattgatattagcattcatccatcctcttacttagaaacaaggggcttgataatgatgttcacagctgtatacttctctctaaatccaaccaaggccagttagaaacatccagcccttaggatgagataaaccatagagaatttgtctttggagatcatctggctcaaccaccttatttatacagaggaagttcttgccaaaggtcacgtagttcagtggtagggaaaggacttgaacccagtcttcttgatacccagcccgaatttctgccctacatttgctgatcttatccgatattaatcatcctgtcttctccagacctcgattctccaagagacttgactgctactgaggttcagtcggaaactgccctccttacctggcgacccccccgggcatcagtcaccggttacctgctggtctatgaatcagtggatggcacagtcaaggtattttaagtatataacaactcctcaatgctagttgaagcatttgcatgatcttcaaagtatggaagaattacctgatgctgtttttctaccccagtgcatctggggagctgaaaaaaaaaattagtagagactggatggcatgccagaccttctgaatcatactctccagcctctttcattttaaccagactccagttctgataggcagccaagatcaagaaccactgcttacaagacttgaggacattttaggagctggaatcttgatcctttaatattttgttgaacaaaggccaaaaggtttctctgcatgtttgccatatgtattatctcacagatggtatctttatattatatattgtaatatgtttcaccgtgttcttatgatatcaactgttaataccatttttatccagtgtttatattatttatattcgctacccaagaattttctttcttttaccttttaatttgaaataactttagatcttcaaacaagcgaaggagatttcctaaactttaccttccaaacttgttattgaatttttcattttggttatctcactttatatttccaagatcttttgcttgttctccacacattgatctttttctggcattttgtttgtgcttcctatatcatcatctctttatctctaagaatatgttgctggtattttattctatatcctgcacagtgtttgttacaagtttctttgttttgctgctgttgttgagtttggtttggtttgggtttctgtctttcatgttggagacatccacccaatgtctgttgatcatggtctgtctttttgtatttgaactaggaatgaaagagctaatagggagttagctcaggcagggcttgtcaactttgtggctccctgcagaatgattgggcaagtacccacagttttcttgggggacccccaaataacagtgccataaaacctggcctctcactgtgtacaaactttcatcttattatgtttccagtgtagcacctcggcctccttgaaggctgagcctggtggatttgaatccggacttcctctctggctcaacctttccagagagtaaacctcagcctaccatctgaatgggaaagggcagtcatttagactgttggagggaatgaggagatcttagagtctgtttcttacaaaaaagcttctaaacaaaccaaacctttgttcaaccacactccacattggcctttaaagacatctctgcttttgtacacattcctttactgaacttgctggactctgtgacttgcaccaagcagcctctgactagctctgcccatgctccttagttaacctcagccttcttcattcattcccctccatggtctctctaccactcactttctatctaccaagtttctggcacacctgttgctgtctcctctcccattcccctcatcttcatggatttataccttacattctcttgctctctttttagtgggttttagaagcaagtagagatgagtggctgtatccaatctgtcatatttaaccagaactggacacattgctaataactatcatgccccttcctggaattgatataacaatgaactatctcactgtgtgagctgaagcaaatcctttatcttctctgggtgtcagtgttcccatctgtaaaatgaatgccttggacttatccatctttaaggtcttctccttgtcaggcattctaggattctgtgtttacctgaatcatgagtctcattttgatctagagtaccctaattgcctagaaaatggctttgcacagaagcctagagaactgacaggtaattgtattcctaagtaattcaatgaacccagctttatccctgacagttgatctttcccccagggactagaactggggggctgcaaaaaggcctctgggtattaaatgagcactcatcccagtttacttttctgcatgtccattcaccagctttacatgtcttagaaaaaaaatcaacctggtataggagaaaagagtcctggacagggtgttgggaaacccgcatgcaagatcatcctctgcctccaacaatttatggaatgagagcaagtcttttagcttctctgaaactcaattctcccattgaagaaaacaggataaggtaccttcccagttcccaggatgcaggagaaccttccaggggcttctgcactgatgcatgactgcccaaactaagctggctgtttgcaggttgtagagaagatcgttgtgcttggtttactaggagtgtaggttgaattccaatcccagacactaaggtcatttgctgaaaagaattggaagctagcaagagggtgtggaaagaggatttcctgcaaactgaaaccaatgacctcctctgtacagcagcacagagaccagccacagactacaagtgtagttagagttggtcaacatctgtctgtcatggatatctctgttctagaagagagacatgtgaggtcagcttaagttttaatcctaccatgcctatggggctattataatcatctcctaactcaagagatccccaaactgactgcacattcaaatcacttgggaagtttcttaaatatagccaggcccaacttctggctctgatgattccatcagtctgagatgaggcccaggcatcatattgttttaaagcttctgagagtgataaagagctatatttagggaccactgacctaactgacctcaaagtcccttaccctgtgtgattcatcttgctaccagattaagcttcttaaagcacagcttggtttatgtcattggcatgtccaaacatctttcaaggctccccatttcttgtgatgataaacttcaagttccaaagcttagcatttataccttacagggctcctcactccgtttaatgataaactttaagtttcaaagcttgtcatttaaaggcccttcataatctagtaacattttccactgttctaacacctgaagctaagtatggttgaggtcgcttattgcctccttatattatttcattttatgttttaaatctgctttattcaaagtttactgatttaaatattaatctcatccaaaaaaaaacccccttcacagaaacatagaataatatttgaccaaatatctgggccccatggctcagccaatttaacacataaaattaaccattacaatcccattctcccaatatagtttggcagggccttgggcaggtggtagccttagccctggagtctacagcagtgctctcatccttaccagatgcggtctctccctccttatattattttaacttgctctgcaccttctggcccaaggacctttgcttgtgctgtactctccccatctctgatatctcagcagtgcacatggagcctggtagagagtgggtactcaatgaattcttgtccagtaagtaagtgaatggatgggtaaatgaacttataaatagaatgacttcttatctataccctgagaatttctgtgaccaaaagccattatactttttcttctgctcttaggaagtcattgtgggtccagataccacctcctacagcctggcagacctgagcccatccacccactacacagccaagatccaggcactcaatgggcccctgaggagcaatatgatccagaccatcttcaccacaagtaaggaggcccagggtgccatccagccttgagatctaactttgactgaatcaacccttgacttcccctttgacttctactttaaaattttcaaacaaacctctgaaaagaatcgattcactgctactacttggaagcctgaggaaagcaaatgtgggagattatgagcatcccggtgaaaggaaaggaggaagcccatctggattcagtccccatttctatcacctgctaggtgtgccttaagaatgctacttccatcctataatctttagcttcttcgtctatacagggagattaataataaatcctctgtcaccaggaccttgcaagtgttcatgaggtattgcatttgaactcctagcccagtatgtggcccatataattgtgtggtccttttattgtcagagttcaacatgagctgaaagtctctttctttctccttcatcatgccagtgtttacaaaacctgtccacattcaaaatcacaaatgatcttcccaccaagctggtatggtgagccctatgcccaaagttctagtggggaagcagacactttcagagactaaatgacctgttcaagactatcttgtgagttacagtcagagttgggctcagatattccatgcccagggagcctccccctgcacctgtcacaaagtatcttctgcagatagcaaacctgcaagttgttccattgataagtaagagtggcatccattcctgaggaccagaggagctggcctttggagagccctgcctttgaaaattcacgggacagtcattctgcacacatctgctgaagaaagtgcttcccctttgccagatcttatgccagatgctaactatgaatgtatcctaaagatgctcttatactagggctgtgaaataaataagaaaacagctcatgatacaacctcagatgaatgtcctcagatcagaaaaaagaactgctatgatcatcagctctaagacccatctactaggcatagttccaagattgcccatttctatgagtttttaattgtttgcatcacattattgcacctggaaattccccaggcattctagtccatagagttaagctaagaattaagctccagctcagtcctcctgcactgagagcatcaccatttctccttattccacagttggactcctgtaccccttccccaaggactgctcccaagcaatgctgaatggagacacgacctctggcctctacaccatttatctgaatggtgataaggctgaggcgctggaagtcttctgtgacatgacctctgatgggggtggatggattgtgagtaccaccagggactgcagagccctcaggcctaggggaagagggagagggcaaagcaggggaggagaagagggtgatctcctcctgatgcactctgacacccccatgtgtgaggccttgcaagatagtgcctgtcacacagaggcactcaggaattctctcttaaacaaaagaatgggaaacacgctggctactttttgaaacggggagataagtttcttgtagtttatctcatccaatcctcatcaaacaactctgtgatgtataaatgacagttgatcattgaacccattgcttacattaattagcactgactaagcatttattatctaccaggcactgtgctaagagtttaagatgaattattccgaccccattaccataggagctgggtagtgtatttttgaattaataaactctatttttttagaacagttttaggttcatggcacaattaagtgaacagaagttttcatatacaccccacacccacccacacaacctccccattatcaatatcctgcaccagaatggtgcatttgttacaatcaatgaacctacattgacacatcattatcacccaaaactgggtggtatttttaatccctgtttttcaggtgagaacaccaagacttaaggaggggcaggtgaccacccaaagttacatagcaaattagggatggacagaatggagcctgatgctctctccacagtgccacactccttcctctcacaacgatgccctctttcctgcaatagcttaagtacacccagattcatcgatatgtttataggtgttcctgagacgcaaaaacggacgcgagaacttctaccaaaactggaaggcatatgctgctggatttggggaccgcagagaagaattctggcttggtaatgcagccctgcatgtttatatctaaaatgcctgattctgccctccttgtcacttttcctaacccacagggacctatgggagagaaagagatgaggaagaagaactacttctggtggcagacacagaatgtcaaattcttaatgaaaaagactatcatttaaatgctctgaatcatcaaaatgtaaaccaaaaagtatctgagacagatctcaatcaatttagaggtttacttagccaacgttaaggacacgcccagaaaaaaagaacacaaagccacaggaacagcctgtggtccatgccttttttttttttttttttttccagagataatattaagagttttagtgtttaaagggggaaagccacaggaacaacctgtggtccatgactttcttttttttttttttttttttttttttttttttttttttcagagataatgttgagagctttagtatttaaaggggaaaagtgggctggagggatatggtcacattactgaatccacatgttgcaagataaaaaaaagaaaaaagcagaatgacaaaaaagagaatggtcaattttgtattcatctcacactcagtaaatcggcactttacataagataaagtgaagatagaataactatctgtggagatatctggccttttatctgtagcatctgcttagggacaaaaggagaggcagtttctcccatgactcggctttcagtttattttttttcctattggcagagttaaattggggtcccaagattttattttcctttcacaaaaagtaaaatctgattaaggaagaaccaaaactcagcccttatgtgttaacctagccttaagtcattctctggaccagtcatagaatcctcctcactgatatcattgatatcttccctcctgtgccccaggttgtgctccaggtgctaagatgggtttcttagagccataatatttaacccccatagcacccctacaaagtactcaattgccaccgggtgggcaaggtgtcaggtgtcagaagtggttgactagtgggttggtaagacgaatttactaacaacagtataggtttgaaaaaggaacgtttattagaaagaaagaatgctgcaaaaggacttacagcccctgcagtggatttttccttaggggtatttatggaccttaaggcaggagcttaaggataatttggaccctattagccatgtagaacatgatacatgattacatttgtagacattttggtgccttaatgtcagcaagggttgcaaaatgagttttgatatgcatgtattccagagatgtatagaagttccagttacctataaatttttgggaaataaacctggaaccagatgcttgcttgagatatacggaagcctaattacctttaaatccctcagttaaggggtttttgtctccgagtcctacttgatggtcaccaggtgatttttgctctcctcaccacctcgcatggataaaatcacagcctcaaaaagactgagtggtttgcccataggagtctaaccaatgaacagttgagctgaaatttggaatctcctaagtcaacactacaatcctatcacccatccattcatccatgcaatccacactttccaaccacctaactgcagagaacattgttctatgcaccactgcctaccccagaaaatgtttatcatattataataaacatttatctatattattcattgcccttcatttgtaaggcactttacaaaattttatttgtttgtttgtttgtttgtttagacagagtttcactctgtcgccgaggctggaatgcagtggtgtgatctcagctcactgcaacctctgcctcctgggttcaagcaattcgcctgcctcagccccccaggtagctgagattacaggcaccctccaccatgccctcctaatttttgtatattcagtagagacagggtttcaccatgttggccaggctggtctcgaactcctgacctcagatgatccgcccaccttggcctcccaaagtgtggggattatgggcgtgagccaccgtgcctggcctgtaaggcactttagagtttaaaaagtactttcaccaccttatctccttggatcttcactaatgcactgggaggttggaagtggggcaaaaatgtcaacccgattttacctgagcctagtattactccagcaagcacaagactgagcttcaagcacaggcctgtgtgatatggcccttttttttttttttttgctttctgagatggagtcttgctctgtcacccaggctggaatgcagtggcacaatctcagctctctgcaacttctgcctctcgggttcaagcgattctcctgcctcagcctcccaagtagctgggactacaggcacccaccaccacacccagctaatttttgtatttttagtagagacagggtttcgccatgttggccaggctgataacgaactcctgacctcaagtgattcccaccacccccacccccaccccctcccaccccatctctgcctcccaaagtgctgagattacaggcatgagccactgggcccagttggccctgtcttaagtgtacccagttgccgcttttacagagtgaaatagaaatgagggcctcagtcacctgtgcttcttagcaacccttgcctgtcatccacagggctggacaacctgaacaaaatcacagcccaggggcagtacgagctccgggtggacctgcgggaccatggggagacagcctttgctgtctatgacaagttcagcgtgggagatgccaagactcgctacaagctgaaggtggaggggtacagtgggacagcaggtacagtagtggctgcacgtagagcctacaaagccatggagaccttcttgacatttacagtttatttctctaactttcattccttcctcattaatccagcaatttattaaatcaacaaatatttaagtacctactgagtgccaatccagaaaaactacaattcaaaagtgttgggtagatatttgggtcctgaaacattgagtatgttgggaatcagggcaatcaggattgatttctaatgaccatctttcaaaaaaagtgtgtctttcttacccagttttagatatcagttgtagactgattaaaaaaaaaattccccaaaggccttaatattcatccaatccagcacttctcaatttactctgggtgtatggacccactggcgatcttgtgaatctccagatgctgacacaggttgtctgggatggggctgagattctgcatcttctccaagttccctggtgatgccaatatagctggtgttgctggtctgtggaccacagcttgagtagcaaaccatccactccatcacctagctgcttgaatctcttccaagacatccctgccatgtggtcatctagtctcagcctgcatcctcataaatagaaggtctcacctctcaagtggcccctgcattccttgtctggctcataaccttcattccagtcttgaagatttcttggacttgaagtggttttgtgtggtttcctggctccacataagaggagaaataaataaggaaacaacatgtattaaggccctactaggtaccatcctcttttgtagatattccacctgcattcatcttatttattcctcataaaaccattttatgaagacgttgtttttatacagaggaggaaagaagttcagaagagctcagtgatttgtccaaggtaaaacagcttgtagaaggtggatgcaatcctggctgcagaaaactgcatccgacaatgttctcagtgacaaagaagggtcaggactgagagtgtggaccacccccatgcaacccatgcccactttgggtggctttctgttatgtttgtgagagcagaagagatagaagcttggcacgtttccagcctccctgagccctgaaagaaaacatccataaggtgaaaagtctccagataaaaggttgccaaagccaggctgagcctaaggaggcacaaagctcttttgagatggcagtttagtgataataaagagagacacccaggggcaaacattgctttagttcttgaatccctcaaagaatgttggcattttattacctggaaatgaatacctctttggttgagatggcttcaggcaagaagaagaatgttacagggcaagcaaattcattaagcagcaggaatgtggcctctgttcctctctctttgtgcttccattgaggaatgagccataatatttccctttactgagataacgtttgtaaggctgcattttcttgtgtgatttggctgcacccaggccttctgcaggagagcatcctgtttcattaatatctacgtgccgtcctcatgctctgggtagcatcatcagttaaaaaggtatctgggttcctttgacaacttgctccaaattatgacggtagaatgcctcagagtcttgaaatgtttgtgcacagcacttgtctggattgggagtgaggagacccacaaagcaatggtactgaaatgcttcaaaaattcaatatattaaattacaaattagatttccaaatagtagtacatgttaatgggcttcttgtctaagaatcacggaacatggtctgatgaatactttaaaaagtaactatgtgatacagagactatttagggacatctaatgtctgaagggcttaattatgactaataaatatttgtatgtgggagaaaagcatgccattattaaatgcatacttctcaccttactctctgaggtctttatagaaagggaatgcagaaaagtcataaaaataacaatcatagtaagtatttgtatgccatgccacctgtttagcatacacctttattgtcacaatggcactactcagtatatagaatcaaagtgctggttccattgtatagatgagaaaactgaggttcaacaagatgcttgacttgtgcaaggtcacagctaaaaagtgaaaagatgggattcgaagctagactctccaaagccagccacagccctcttcccaccacattatgctgcttctgtcggaaataagtactggggtgacactcatgtcccattcagttccgcattcaatgctgactctgggatcaatgttcaaggccagtcccacacccagaacctttcaattgtcacctctggttctgccctttactgtccaggagggaaatttcagctgagatttctcaggtccatattttctgtctctcccaggtgactccatggcctaccacaatggcagatccttctccacctttgacaaggacacagattcagccatcaccaactgtgctctgtcctacaaaggggctttctggtacaggaactgtcaccgtgtcaacctgatggggagatatggggacaataaccacagtcaggtgagtggaccgtgagggcccagagcaggccaagcttgggaagctggagggggctaatggaagtacaatttaactccctatcctagcagagactaggaggcaggaaccttacttgtatgacaacatgtttttcccaaggcagtgagcaatctcaaggacactgcaggccaggtaaaatagaaacagcacaggttaacccttgacagtcccaaggacaaacactggtcaaatggattccaaaaacagaacgctttactcagacaaaatctctgtctgaaccccaaaagtaaagcagataaaagtggaggccatttaggtgaagcagggttgatgacacagaacccctggcctggggcatctttggaatcccaagaacaccttaaaatgaagtccacagactttaaatctcctccttttgtgaagaaaccaaggcccagaaaaagctgactttcctgaggtcacagagtgaagttggcagcagagccagctctccccacttccagcccctggcattttccctgcaccacacacacctctagcacttctacaatcacagaaacagatttttttcgatcccttttagaaataggcgaacggatcaaattcagtaatctcccttactctgagccttgcctacactggcacattcctgaaaagtgtaaagctgtgtgggactagccacttaatcataaccaaacccctgcccaggtccctccacagaagttagtcaccatccctgggaggagggctggatcttcccttggggccacaccacgctgatccctggaccacaaggatgcttatgaggtctgctcactggaatcccaaggactttataaaaatgcaaagggccaaattccactttatgataaccccagggattctgattcaatgatctcaggcaagacacagcatctcattttttttttttttttgcatatttgcatttttgttgttgtggggtcaggggggaggcagttgatagactccacaagcgattcctgacatgcagcaggtgttgggacctgttgcttttcaatattagtcactttgatacacatgtttatgccctaattaactgctagcaaatgacacctgcgaccttaagtgtagaccttaccttacataatttctggcacttttcaaagcactgttaccttctgtatctcaagggtttatcatttttaccctgtgcaggaattaggatgtggtttttcatgcctgttttacagaggaggcaagagtcacaggacatttcttgacagcagtcctgtgttgtttccatcttattgtgttatttcatcaatatttccattctgagcattattttatcatctttattgccttgtctcaaaaatactcgtataatacaaagttcttctgggaaaagaaaaaaaaaaccaacaagctacatgttagaaagcaagcctctctttcatccttccattcaattatggaagaagaaagagatgacatggaaaggagccacaggaggggagccccagctccagctctgctcctcctgctgtgtggcctctgcaaagtcactctccctctctggctttagtgcccaccacagtacaagaaggcgtggcttccaaccctgaactatcagaggaaagaaccagggcaaaggcaggcagcatgtgcaccaagctgttggactaccatactcactgtaactgagtaattacaagcggatttgcccatgaaatgaatgagccattcttaaacctcacatccctgtaagactcagaaactgcccatgtcagtgaatgccaaacaattagaagcaaataaagtgtctctatttttttcccatctcactagccattaacttccccacagtggggcaaggggccatgtggggtttcatggattgactctaccatctgcagacttcgctgaagagtcaaagttgaaacctggaagccaagacacagatacagttttttcttgtagaaagctttggccaaaatttcaaggatatttccccctacttgagactagggaagtaatatttaccaagcacctacgacgtgcccagctctgtgatagctcctttacaaactcatttaatcttcatctcatctttcaaggctaacattatcagatcttaagaaagaaaaaaaaatagtaaaaccgaggctcagaagatattgagaacttaagactatttatctctcaagtaagaacactgatatttaaccctatatgtcaaattgtaaaactgtgttttgttgagctgttcgttctgctattccataccaaacccctatcaaaatactccataggaatctcgtgaattacagacacacacacacacaccatgtatgtagctattcaattctagaacttctaataatgacctgaactccttcagaacctattcctaaggacggcagatttcatcagccaccattttgcctcaagaggaaagaccaaagctccatgcaaactcaggcgactcttgactcaggtgaaaaactgggtcagattcagccagttcctttgaaagtttccacaacccagaccaacagagagataggcaagaggcagctgtgatataccaaatggtcaaattgaaacagaactcatttagtttgaatgactaaatagcaatgatcagtgaacacctcgcctaacagtaaccaacctggaggccttctctctctctctctctctctcttttttttttttaacagggcgttaactggttccactggaagggccacgaacactcaatccagtttgctgagatgaagctgagaccaagcaacttcagaaatcttgaaggcaggcgcaaacgggcataaattccagggaccactgggtgagagaggaataaggcccagagcgaggaaaggattttaccaaagcatcaatacaaccagcccaaccatcggtccacacctgggcatttggtgagagtcaaagctgaccatggatccctggggccaacggcaacagcatgggcctcacctcctctgtgatttctttctttgcaccaaagacatcagtctccaacatgtttctgttttgttgtttgattcagcaaaaatctcccagtgacaacatcgcaatagttttttacttctcttaggtggctctgggaatgggagaggggtaggatgtacaggggtagtttgttttagaaccagccgtattttacatgaagctgtataattaattgtcattatttttgttagcaaagattaaatgtgtcattggaagccatccctttttttacatttcatacaacagaaaccagaaaagcaatactgtttccattttaaggatatgattaatattattaatataataatgatgatgatgatgatgaaaactaaggatttttcaagagatctttctttccaaaacatttctggacagtacctgattgtattttttttttaaataaaagcacaagtacttttgagtttgtt

SEQ ID NO: 126 - DNA, 65639 bp, Homo sapiens
acacagtgatttctgttatggcgattgggcggctgcagagaccaggactcagttcccctgccctagtctgagcctagtgggtgggactcagctcagagtcagttttccagaagcaggtttcagtgcagagttttcctacacttttcctgcgctagagcagcgagcagcctggaacagacccaggcggaggacacctgtgggggagggagcgcctggaggagcttagagaccccagccgggcgtgatctcaccatggtgcgttttggctgctactttctttttcagtctttcggtgcggagaaggggaggaggcgggcagaggtctgaaaaaatcgaatgccttatggaaaggaactgcaagggttcctttggggtgatcaaagagggagacacagacacagagagacaaaggcaaggaggactgtctgggagccacgcgggcgatacagtttccgaggcacgccgcgtcccgcctagcctgttgaacaggtagacatgagcgacccaagcgtaagtgccgctgccgcgagtgcccagggtgcactcgcgcggggaccgacaggtgccactgcagggtcccctctcccgctcactgcctgccacccctgacgcctgctctctttctccattcgcagtgcggatttgcgaggcgcgccctggagctgctagagatccggaagcacagccccgaggtgtgcgaagccaccaagtaagtggtcgctgcatccccacgcgggtcggggttcttcagacaggcggtccctcttccgggacccccgcttgggctgggtctccttcctctcctgagaaaccttcggtacgctcccagttgcccagccctgggaagccagcatcgggttcccacgctggggaggagcgagaggaaaggagaggacgcccgaggggccggcccagggcccgggggacccgcggcgcccgagggaggagcacagacgggggtgggcgccgagcagcgccgcgccggctgctgagctcgcggggccgggccgtgagaacgcgcggggcgcgccggggccgctggtctcccacggccagggcgcctgggccccagagcccatcagccgcgtgcagcgctgcggcctccggcgcgccggcaggcaagcgagcgggcgcagctgggggatgcctggaccccggaggcagcagggctggaggcggtggcgggcttcagggcaacttcacccggccggctgcggcgtgggtaagaggcgcgtcctcctccacagcaaaagctgcgatcgctgggctgcccagagaaggcagccggctaactgcccagcggctccacgaggtgtgcgcgtgtgtgcgagagagacaaatgatttactgcttagcagtcccatttctgttttcgttaggactgcggctcttggagaaagcgtgagcagggggccaccgcggtctccgcgcctgtctgcaccctgtcgcctgagctgcctgacagtgacaatggtgtgaggggctgcgttgcaatgtggtcatgtgatttcaggctatggatttcgtgcgtctttctctgctcactgattttcacatggttattctttcattttgcactcgataaacagtttacatcttctgaagtaagccagaagattgtatggctcacttaacgatgactggttgaaggcatcttgatttggaacctatggaaacagtgctgagttttaaataggacagatttttttttctttcatttgaacttcatttataacatatcaatagtgatgttttaggatcagttctcctatggtaatttcactaaatgcctatttaatgaattgatttgatttcatacatctctaccacttactagaactgtctttgtacaaacgtcaaactttcctgttacatatgggtaagcatagaagcacttgatataatttttttttatcttggttcagagtgtagaagtggtctgttgcttttcctaaaattgctatacatattttttctttaagagtgatcatttcaggtaccctattatgtacagtggtaaaaagtaaactcgttatgatagcaacgacgatgtaaccaaaataagcaacacttaattggtctgaaagttatacatataagctttattattgcttcagtggaagttgtctatgcattctgtgctttgttcagccattaaacaactgggtccgtgatcttcttcaaggggccgtgaagtccctaaaattgtatttaaacattagagtggctgcattttaagggagatagtacatagtcaaatatccaaaatggacctgtgtcctaatagaaaattaagaaccacggggtaaaaacacgtaagccatactttttcttatcaaaacaacaggctgtctacatacagcctgcagacataggctagaaggaaaattctagaacaattaaatggtgttaccgtagttaaatatttcacataaaatagaccagatgtatgtattttaatgtattaggaaacaggtctgtgaacgtatttagtagaaatttgtaattaatagatgggtaccttatatttatatttataaggtatatttatactttatattgtaagatctctttctattatacgacagaaaataaaaattatatttttgtctttgaaatccaatcaaaatataaagtacttatgcttggtatagtgtctcatagtgtatgaaatataaatagccccttaaaggtcttgcttctagatattcaggtattaaataacatgattaaaatcgttttctgtcattcggagaatgaggaaggaaatataaaattattttatttatttatggcaataccaaaaacaaaagtgtgaaaaacttcacaatgcttagtacttataactcttataattatgtcttattaagggatctttcttaagacattttgaaaagctattttaatatttcactacaaacaagtgataatattaaaattaaagtatatctattacaaatacatcagtaaaatattttgtgaccgaattttaagaattttgttatatttttcaaatgaaattgaaaaaaattaaatgtttatctaacatcacttttattgacacattgatattgcataactttgaattttttcagaaactatacaagggaaattaaatcctgcatttacatttgctagcaactaatgagtgtggactgaggataatatttcttgctttacaggttagtttaaaataacacgatctgcacccccataatttctaattaaccttttttcagaactaaataaacatcaaattagccatcagaatgaatctctacaagtaaggggaaatggaaaggtaaagcaacatttcagtaatacaagccaaaaagtatgtgcattaatgggaaaaatttttggaggaagctgttactgagaatgactttttctgtcagattcactaagaagttgcttggcttttatttgtgagaatattccattttgaaggcactatttttacactggttaattaaaaatatttacccaagccacttttcttaaacatttctatttattacttttctgcacatttgtaaaaacaaattttttccccaaagtattaataattaaaaatatgtttgtctcttgaccatctacattcattctgcaatagtttgttttgggtgtctacatcttgacttgatataagaagagcttttgtcaatgtttagttactagttgatttactttgggtgaagtaatttcctggctatcctgaatcatatctgcttcttttattttctttcagaacattttgaaatgtcttacctattatatatgtaatttttcttcttccctgggttcatgccaataggcttcatcttcctatagcctcgaaggcttacagaggatgaacagagttattttggaggggtgaaagaagagctgtagagtgggcttccctctcagcccacagtaggagagaatggctacatcttaaaacttgagggactctggagcaggctcttccttgccacaagaatgtgcctcacagcctgtagtttctaacttctggtatgctttctggccattaaacaatatttcattaaaacaaatcctccattttaaaaattgaggccaagtcaaattaattaactcacataccaagtcatctatctcaccatactaagaattagcaggaagtcgacacgagacaatggctttgagagtgaacaccttcttaggggggaagcaaatggggcagacccatttcttaatcctgacctttttttctaggtccagcctatctatttatccccttttgctatgtcacatgacattgaaagtacctgtttaaatgtctgcatctcccattaaactcaaatctccttcacggtatccaatgttggatccatagtgcttggtgcatagtaggtgtctaaagagcttaacattgttgtcattgttattcttgaattaaggcttgtttatgctttgatgctaccacatggagctatggtcttggtgacagagacccttgtgtgctcttccgtcatatagtttgtggcctcttcagaattgcttgtaaactgttatttatttcaccaacaattttaactctgctccaacccttaaatctcttgccactagacctaccagaacctgccttcccaatgtcagcttcacttttaatgtttgctttaccttccttgctgttgatttagctggacaaagagagacataactgtatcttgtagccaactaccaattgcttcactccaatgtcagcttggaggatactttgtgcagctattttattcttttttagttaatgtcatatcaaattctccatggtacatattctggatttttccaggttttctagtctgcccagattatctccagactcttcattcttagcagaggaccatactttttaattcacagaggatgttaaggtcagtttgggcaaattatttgtcaacactcatcttgaatacagtaagcatttctttgaccagctgtgagcataagaactcttttcttatattcagctatcgaatttgtctctataatatttatatctttaattttttacctcttagagtatttatagaaaatgcttttacatctaacaactcttaatagtgtctaagataatattcagtttcttcaacccatgcttatttaccatgggttgagagtctcattgttaccagggcttttctcttttggatgcacttctgtttttattaaagtgtgatccccagagtttaacatagaggactgtcctctgatatatttatcttctctggatatcatgtagtaaatcaacctgaaatctattctactcttcccccctccgttttttttttgcactcatacaacactgtttaattatgtatcttttttgcacattcttctgcaaatacacttattttccccatcgaattttatgtttggccacttgatttgggacttttacaaatacttactgcaattaaatttaatcattacctttagttagcctgttgttccagaaagtcaaggtcatcttggattctgagtccttgatacagaatagccattttcaccaatttagaggaattaacagatttgatcaggatataattaacatcttcatccaagtaactatctacaatgctgaactggaactacctttggcatattcctagacaccgtcctttacgttagactcctgctttacattagtccataaattattcctctttataaggctgttcaaccagttatatagtcaaataactctctttgaagttgacattcctttgtgtgacttaagagagtatactgagacagacttggtcaaattcctccctgaaatgagtctccactttctgcagaatagatgtcaagtaactgctattaaaaacaaaaggagataactaggttagttgacaaggataggttcctgtgacctctccttatcttgtagataacagcacttcacattttgaatgcttgcatgccatgtttttaatcatctctttggaatagtacctgcaattaatgtccagctctctaaattatagctgatggaatccaccttcccaattttgaaaattgaggcaatggttggactctgtcaacacttctcttcatcacaatatttttaaagatgactttaacaattcctttattttatccacacatgctttcaatattttgtagtgtaatttctccaaattaatggatttaaactcatttagaatatttgctatcattctacatgctggacctttgttatttttagttttgttctacttttataagtatggatattgttttcttaaggaatggatatgaaacaaaacaagagcagagtagttctgcctgtttgttcatgtactgtgatttgaatatctttatccagtgtgctcttcctatatctaataaaaatgccattatcaccactttatctggcaatcatagcaagaattaaaaggacattttttcttttttttataagcttcaacttattttatgtcttatattttataacactcttcttagagactcagccactattttgtacttctctcaataaagtttattatggattatgcttgtcactgaggaagatacaaagcaaagtttatgacacacactccttgacttgaaggaatttaaagtctgcatgaacaaaaccaagaaatagtctcagaattatacatgtcagcacttaacaatgagcataatatttgtagaatagttttaataagttttaaagaagttaggagaaggaagagagttcggtatgatggaaatattgagtaaggctttccagaggaaatctaagacttagctgaggttttaaaacaagatcaggatgttggacatcacaggacctgtaggatttaaatgtggcaaacagtaggaagagtattctagacagaggaaaggaaaggattcactgcagggatcagatgtgtgtgtgggtgtgcatgtgtgtgtttgatgtgtgtgtgtgtaccctgtgtgtggcggaacgggtaatgctgagccttcccaggccatagctttgaagtatttatttgtggagaacaccacttttccatttctagcttttcgtttccccttgttcaatctttgtggggcccacacctacacatcttgtagatctcaaactaagctctgcttcttaaaacctttccctgaacttccaagcctaaattgcatgccttattatgttttcctgtaacacattgtgcttcctttgtagaattattatgatatgaataattacttgctgaatttttactattatactgatacttgtggagagaggtaccatttctgtttagttccccattttatacacagtcatctaatacaagtgctcaatggctcataagcactcagtgaaaacgtgtgctatggccgggcgtggtggctcacgcctgtaatcccagcactttgggaggccgaggcgggtagatcacaaggtcaggagttcaagaccagcctggccaagacagtgaaactccgtctctactaaaaatacaaaaaattagccgggcatggtggtgggtgcctgtaatcccagctattcgggaggctgacgcagagaattgcttgaacccaggaggtggagtttgcagtgagccaagattgcgccactgcactccagcctgggcgacagagcgagactccatctaaaaaaaaaaaagaaagaaagaaagaaacaaagaaacaaagaaaacatgtgctatcatgagcctacttggaacagtgaagttatgtggagagtacttgtaaaaaaaaaatgtttaaaataaagaagggttagattacaagtccagcatcttcgttctttatatgcttattctaacagattttttctatttttaaaatttatttctttttacatcttaagcttttttattaaaaataaagacaaaaacacacaccttagcatggacctacacaaggtcaggatcttcagtttcactgtcttccactgccacatttctcactggaagatctttagggacaataacaagcatggaacagtcctcgcctatgaatacaatgccttcttctggaataccttctgatgaaactgcctgaggctgttttacggttaacttatttttataagtaaaactagtaccctctaaaataacaataaaaggcataatatagtaaatacataaaccaataaaatagtactttattatcactatcgagttttatataccgtaggtaattgtatgtactatgctttttatatgactggcagcacagtaggtttgcctgcacgaacatctccacgagcatttcagttatgcattgtgctatgacattacaatggctatcagtcactaaggaatgggaatttttcagccccattataaacatatgggaacatgattgtgtatgtggtccatagctgacagaaacattgttatttggcacgtgacagtatatgcactggaatttttagctgcttatttttctccatttgcaatatcactttgcagcttcaaatatgctcattataagcagttaaatgatatgtggtttttattacattattaagttaataaaataagtgacaaggagtttcagtattccatagtataacataaacttttaaattgtgtatttgtgagcataaagttatatcaagatctttagcactatatatgaagtatttagagagttacaaatgtagcattgaaggaaatttgggtaaatgcaataaaattgtcagtacatgagttgtaaagcaagatatccatatattagattagcactatacatttgtaaatatgattagcaaaaggcaggcttcccagcgaaaacaaacgtctttgggtaaaattctatttcttttaatgttttaaaatatttgtagtcactaattgtaagtcatattcctctttgtccagctctatcccaaataacaatttaatacaccgcagcatctatttctgcttattttctgtgtcactggctcagaataattcataagcccttgttgtttcatcttatgctaacaaaaatccagcagtggtatgtaggagagctgtgatatgccctgataagagtttatactttggagaacaaattatcctaattaaagtcactgcttttcttctcttctctctctcctcctctttgaagctgtgagagtttatcttaacctagactggttaccacctatggctttatggcttgcctgctggcttggctgagagcaagaaagttgtatatgagggatatcacaaggccaccttccacaaaaattgctctcccacttggtcctgtcctaaggcctaaatctcctttgggttgatgcaatcttttggagtgtctcctggagtcaataagatgcctgttttaccgtgaagagcagcacaatgaagaggttgcccaatagcagtggttacttttattatgttgtctttctgccttcaatcaagagcatgacacttggacatagctttttaaagtaaagagaaaaaggaaactgaaaggctcagtatgtgggacatagataagaaaatgagacctaaatagggtgtattgggcaacaatacagggcttaaatagaaagaggaagaccaaaagaaagcaaagaatgtcctaagaagagctggtttttttttttttttttttaacaattttgttgcctattagttttcttcattcctggggatggttgggacatttttccacatcggcatgttatggccttgattatctacctaaatcaaaccagaggaaaatcattttagtttatttttatcttaacattggatctgtttcagcgcgtcctggaaattagtagttgcatgttgtcaccgtctattttgtacacagtgaaaaggtatttggctgtgtttctatttacattcactgtccttgataaatactaattggccagtgattgtaagtctcaagaatttttgctgcagagcgtgtgttaaaactcattttaagtggtgtaggagtcatgcagtgtttatcacttaagtgggtaatctgacagctgtattttactgcctgactgcagctttattcttgatcattctcttccttgagtagtgtgttatggtcatgttgtcttagctgcaattaattcccaacctttttttgttttccagtctttgtcttttgcatttatttttctgctcctgcaatgccttactttgctgtctctgcctcgctatttcctatttattctacaaagctcaccttaagtgtcacgttttcagggacatgtttaccaatgtactgtacaggggcacatgcagattcttcatgtccccatcacaacctgtcatgacatcacactgaactgagtttgtgtggtctaagtctgtccgccccaacctttactcaaaacgttccttaaggaactaggattggattgtttttatttctttgtttttgtttttaatccctgaaatttcgtcctttagaatgtagtaataggtacctaataaatatttttggcatatgtgaatgaatgagtgagtgaataaataatcagattagttgatgaaagattctaagggaagattaggtaatgtgattataagagaaagatcctgaagaatgcttgggaatggatcctttactcatacatgattttgttcatcagcttatatgtaggatcacagtcatttggaaaatattggtccattgaaatttatacattttccaaatggtgacacacttcattatacagtgtcaaaagttagccttcatgactatcaccactgatctcatcaggaagttttaagtattggatagctataagctcacaatggcagtcctagatagtgcagccgtggattgaaaaagtgttctagtttcctctttttaagccaagaatccatccttaaatataagaagaaaatcaggccgggcaccgtggctcacacttgtaatcccagcactttgggaggccaaggtgggcagatcacctgaggtcaggagttcgagaccagcctggtcaaacatggtgaaaccccatctctatgaaaaatacaaaaattagccgggcatggtggtgggtgcctgtaatcccagctactttggaaactgaggcaggagaactgtttgaacctgggaggcggaggttgcagtgagccaagttcgtgccactgtactccagcctgactgacagagcgagattccatttcaaaaatatatatatatgtatatatatgaaaaaatcaatagacttggtcttagaataaatattaaaatctaaaataataagtttatataaaaaattagcaaagtggaattacttcttatgtttacatttaagaccaagaaaaacttcaagatttcaaaataataaattattagacaataatgaaattacaaacattataacaagtatactgatagttaggaaaaataatagagttctgagaacaaactgcgttaatctccaaaaatgtacacttatactttaaacctactaatttagaaaattctacacaaatataaattccattagaatgattacatcatcacatgtcatgtagtctctggagaactctgctgcaatctgtgagagaatgagaatgaaaaaggtgcataatattagaatattgttatgaaaatagttctgaccatgcatatcctctgaaaaggtctcaggacatccccaagagtttgcaaaccacatttcgagaaatgctgctttaactcaaatgtgtcttgaacaaggtaaacataaaggtttttacaataattttatatcaagtccagtttataatagtgaacatttcttaggtacattttacattccaagcattaatacaactgcattactttaatcaaatcccttgaggaatgttctattctcatcactgttctacagatgaaaaaatggatgatgcacagagtagataagtcacttgcctaatgtcatacatttaattaataatggaaccggtatttgtagccagggagggttcacacttttacttactatggtaattactatggtaacctttctgcccacattgcaagttttcctgatgatttgtgaattacccaagttttgcttataaacaatagcatttgttgaatgtctagcattttaagaaactgccaaactgttttccattcccaccagtaatctgtgagatttccagttattccacattgccaataactcttgacattgctgaactctagaattttagccattctaatgggtttttgtttaataactaataatattgagcatatgaagaaatgtttatgactgtttatataccttctttaatgattgtctattcagatgttttgcccattttaaaatggaattgtttattttcttactgagttggaaaactgtatattctgaattaaactcccttgctgttgtgtgttacatatattttcttctagtatatgacttgtgtttttgtttatgtaataatgtcttttgaagagccaaagtattttttttattttgatgaagtccactttatcatgctctttttaaatatttcatgttttttttttcaaatttaagcatctttgcttcaaacctggtcacaaagaatttcttttatgttttcttctgtaagttttatagttgtaactttcgtacttaggtttacgatttgtcgtagtctgtttattttgctataaaagaatacccgaagttggataatttatttacaaaagaggtttatttggctcaatgttctgcaggctgtgcaggaagcatggcaccagcatttgcttctagtgagagcatgaggctgcttccactcatggcagaaggtgaaggggagccagcgtgtgcagagattactgagagagagaggaagcgagggagagagagaggagacaccaggcttttgtgtaacagccagctcttgaaggaactagtagagcaagaactcactggctatcgtgagaacggtgccaagtcattcatgagggatctgcccaatgactcaaacatctcccatttcactccacattcaacactgaagattagatttcaacataaagtttggaaggttcgaatatccaaaccatggcatggtccattaagatttaatttttgtatatggtatgatgtgtggataaaagtttatttctatttctatatggatttccagttgttccaatggcatttttattaaaaaacaaacaaacatattttctttcctgattttattgccttgacacctttgttgtaaacacaattgtggatctctatctcattgatctctttgtcacccctttcaaactgatacctcactttcttgattactttaactttttaagttttgaagcaggtatataagtccttcagtgctattttttcttctttaatattaatttggctatcctatgtcatcaatgaaatcttagcctcattttgtcaatttttactaaaatgatggctgagatgttgattggaattgcattgaatctataaaccagtttagagaaaatttgtaccttaacaatattatacatggtatatatctctccatatatttagaccttccttaatttatctcgtgaatgttcgtagttttcagtgtaaaagtcttgtaagcctttggttagatttattgctaagtatttattaacagtatcataaatgagtttttaaaataattattttccagtatttgtggctagtacagaagttataatggaattttgtatatcagtcttgtatcctgaaacattgcttaatttacttcttagttctagttattttgtatatccactgggaattcctacatgaacaattttaagtatatgtgtgtgtgtgtgtgtgtgtgtgcacatgcatgtgtatgatccttgaacaacacaggggttggggcactgacactcctgcacagtcaacaatccacataaaagttttgactcctcaaaaacttaactactaatagcttactggtgactggaagctttaccgataacataaacagttgattgacatgtattatatactgtattcttaaaataaagtaagctagagaaaagaaaatgttacaaagaaaatcataaaggaagagaaaatatatttaccatttattaagtgcaagtgggtcattataaaaaatcttcaccctcgttgtcttcattttgagcaggaggaggaagaagaagataaggggttggttttgctacatctgggatggcagaggcagaagaaaatttgcatatgagtggacccatggagtttgaatctgtgttgttcaagggtcgattggatacacacacacacacacacacacacatgcacacacacacacacatgcacacacacacacacgtgcacataaacctgcaaccttttggccttttgtttaactgattgcaatggctaggacctaacttctgtacaatattgattagaagtggtgagagcaggcatctttgcttggtcctgaataatagtggaaaagtgttcagtctttcatcatcaagtatgactcaataattatagttttcatagatgctttctgatgggttaaaaaaattatgattgcagagcttgtctcacttgttctcattattagtgttggagtgggagtctcttgtgactttctgcaatttaaccagaagtcaaagaccctgtactttgagctaacttttgtgctctgtatagtaagtatttctatttacagaaagctacaaatataggtaacaaaagaaaaggatttcatatcctcacaatccttctttcaaacttgctgtttcccaatccacagatcttaatgtaatctgtactcagttacagtgtagtactttatcactataactccttattttcttccactttcagtctactattcttattcaaaattttgccttaaaagccataaacatctttctaatttaaaaatcaaatgatattttctcagtcctccttaccctcttcagacttgtgacatacacttcttttcgaacacgtgtcctctttcatattcattctcattgtacttttctaattgctgcttctctgtcatagtcataatactttctccagtccttaaacatgaggattccctggagttctaaatttggttatcttctctctatatatgtagcctcttgatcttaaacagttttagttaaactcctgactataatggtttctgctatggggaggagcacaaattcatctctaatctgttacacatttctgaagtaaatactccgattttcaaaagcacctccaccctagattccctgctacctcagttcaagatccatgtatctaaaacaaattcaacatcctttctctcaggcctactgctctgtttctgttacctgtttccatgaacggtgctatatctttctacacaaaacttcagagtcattctattcctcagatctagtgagttgccacatcatgccaactttaattttataatatctctagtagccatcttttcctgcctctttcccacaatttccttcatttcttgctttcacttacactgttctttctctgtggcgtgccccttgccaaaatcttaattttcagaacttagtcatttaaaaaaataagctcaaattctgtacattccaagaaggcttccctgatgattcttttgccaccaccgcctaaatctgatatttcttataaacagttttaactctctatctttacttattctccctttttattgtagccattagctatttaataaaatttcttatatatacataagaaaattcgactgggcacggtggctcatgcctgtaattccagcactttgggaggctgagcggggcggatcacgaggttaggagttcgagcctgaccaacatggtgaaaccctgtctctactaaaaatacaaaagcattagctgggcgtggtggtgtgtgcctgtaatcccaactacacaggaggctgaggccggagaatcgcttgaaaccgggaggtggaggttgcagtgagccgagatcatgccactgcactccagcctgggcaatagagtgagactccatctcaaaagaaaaaaaaagaaaagaaaattcagtgtgtgtgtgtgtgtgtgtgtgtgtgtgtatataccccactcatatcaggctttgaagaaaattaaagaaaggaatattttttgtccttttatgaaacagtaaattttgattgaattataaatggatctactgacaactcattttaaaatgtatttccaataagcaagacattttagaaactctgatttagctttcttttatttgtattttatgttttttctggttcatgttttgccccctatattgattatagctaatagcctaatattaatatattttattgagattagttaatattaattgagtggccaaatgatggatgattctgtgctgagtgtttctgataaggcagtcaagtatagaaacatggatggtttttcatttagctgatttcacagcaaagtgcaaaaggaggataggaaattacatgagcattgttgatttctttatcaagcacagaccttggaaatgcataaactctatgtatagtgagatttcactttttctgaaaaaagttgaaaaacaacactaataataagtaaaatagaaaaagagaatatataggaaaacaaaaaaaatggcttgtcaaattgtgtgtcatttacagaggtgtgtttgtgtcttcacatacaaagaatccagggaaaataaatggaaaaaaattgaataaatttaataataacaatttagttagcctatctatgtcacttccgtgtttataccagatgactcagagccagtagttctttcaatttcagcagaaaataattattggcagtcccaaagttggataaactgtgacctgcattggctggtttgattaaggctggaaaatagcaaacttgattaagtgacaaagacaagataatgaggaaagttatttagaaaatgtgtttagagatttgaaaagggactaaaagatagtttctcaagaaagtgcaaaagaagatgagaaaattatgaaaaagagtctggggcaacattttaggaactgtagacagtgaaagcaattttataatgtatgttaatattagcatgatatatagacgaaaggtaatcttctgattggtctgagatgaagtagttatgttaaccctcaaaagatgatgaagtgtgaaatttgaattcagataactaagttttcaagttttctcaaagtattccctgcagtggctggtggtccacaaagaaaggagggcttctcagcattttcagtagaggaggtcatcagggtatattgggtgaactcaatacacctatacacctcctgagctttggggtttgagccacatcactgaagtctgcactctgtcatctgcaaatggaagggactgcaataaataatctctaactcctcttccagttctaaactcctattatgcaaatgactctgtctttatattgacttttatgtaagaggtactgaaatgaataggaaaaattgtttggtatttctttaaattttctctattttgaatcaattagatggcagaggcattaaaagaatatagttgtgggtttggatttaatgggaaaagactcagcctttctcaatatggactttgcaagcatccaaatatatacctgcaaagtatatgttcagaagtccaaattcatttctggtaatgattcttctaaactaatcattatgtaaaaacttggcagaattgagtttgtgttggaatttgccacgtcttttgctaacctgattccagcataagcatcaaggatctgtgtcccagtgttatgacaaaagttcatttcctgtcttaagaatcagaaagagctttactgctggtcagaaaactagaaaaggtacctgactacccatcaattactaataccttagtagcctggtcccctgggccacctccaaagaaacatctgctgagtctccaggcctcgaatctcacacttcacttttatgagccttttctctggggtcataaaagaaaatttctctgagaaacgtactttgccaaagtttatcccttggctttgttgtaaagatcctttaaatgtggcagagacaccaacagcctttttagctgcctttcaattcttctctgatgcctaaaactagagaggctcaaagtgaagttttcaaagggagtctccttagagttcactgggaccctggaagcatctctcatgccttcattttgggaatatctaaacttcattaccttaattgacatgcccaacaacctgatctttcattttattctgtacactaatttaacagatacaatttagtctttgttttcccagattacattttttagtaggggaacttgaataataatcaccatgatatgtcaaaagctcctggtttctcaaggcagctccacagcaggagctctgtagttagatagggttgggttcatttcctgtttctgccactcaccagctatggccaaggacaagttacatgatcgatgtttcagattcttcttgtgtaaaaaatactaaaatacacaaacacacactcacacacccttcccataagattgttgtgaagattaaataagataatgtatgtgatgtccccaacagctctttaaagcaggagtcagtcaacagaccccatcaaggacaagatagtagctacttaaggctttgccagtcatgtgacctccatagcagttactcaactgcacagtttgaacacagtagccatagacagtgcataaatgagtgggtgtggttgtgctccaataaaagtttatttatggacatagaaatttaggtctcatataatgctcatgtatcactgagctcctggtgttctcctgcatgacagcttagctttgtctgaccctctcagccctgctccagcttccgcagctcctccaccgcctgaaccgcctccattgatgcatctgttcttgttctccttgtgttttttttttttttttttttttttctctttgctgttctttctgtagccaggcctatacttctccattaatgtgttcttgattaggtttggtaagattctatctccagcattgcatagatgtcttaatttttcatagctgtataagtttcttgtcctttctctcaaagagcttggaaaaatttccaaaggctggattagaagaactgtgagagtcactagtgtctcttattccagaatcttctttccaaatatgacaagttagagtccagccagtttgtctttcccctaccattcggtgagttctgtactcacaaggtcactccttccttcccatcaaggatgaattgaccttggtatctcctcattgctcagaaaggtaattcaagtgttccacaggtcaatcccagagtcacttcacttttgtcaggaatccctgtgtctcttactttaactggactctgggtgacctatcttgtttgcacaaatatcttaaagtgaacatgccaattagtgtctcacctctacctgctcacaacctaaacctttccaccaaactaacattgagaaagtaagtagataaaagaattattggccaggcgtgatggctcatacctgtaatcccaacactttgggaggccaaggtgggtggattgcctgagttcaggagttcgtgaccagcctgggcaacacggtgaaacctagtctctactaaaatacaaaaaaaaaaattagccgggcgtggtggcgtgcgcctgttgtcccagctactcaggaggctgaagcaggagaatgacttgaacccgggaggcagaggttgcagtgagccaggagtgtgccactgcactccagcctgggctacagagcgagactccgtctcaaaaaaaagaattatcactgaatccatatttagaagaacagttagcttataaaagcaataattagagacaggattccttgtataacaaatactaatcatttcccaatatggcattctgggaaaataaaatcagataccacaggatttctatttaagtttggttgttatgagattttgttttgttttcaaatttccacattgggaataatatgaattaataaaaaatagtgagtagtgcaatggcataaggcttgcttgatttataaaatagttttggcttaacgagtagaaaatgaggtttaaaattcaacatagtcacccagtttttatattctaatatttcattaaaggaattagacatgcaacttattatataatagaattagataagataaaaccaaaatagaatctttctgctctaagctgtgctgcaaattctataattttttagttcaataaaaagaactgttgacttagatataactttcttggtatattctctaatgctcatcaagtaaagattgctttctatatttgtaggataatgagcattggatatattattagagttcccttaaacaagctttgatgcatgaaaaaaatggtttcataagtataaaacattaaggaatctttctgagaagctagaataaaattgtcaatcatttatttaataacttatgtcagcacaattttcttgtagtatgcaatgagcatttacatttggttgtatgtaccaaaaaaaaattttagggttgctctgaagttatcaaggagacactgatcatttttttcctgttataaaaagttgcctagagctctagtagaagaagcatcacagctttcgtaaggcaagtgactgaagacttgatccaagactggacttttatctttttttaaaaaaattatggacctatggatgctaggcaagaccaggcactttatatatattattccaaattcttaatttgaatctgttacatcatgactttaccattttatgtgtgaaataacagaattcatgaagttatgaaacttgtccaatgtcacactaccaccgagtagcatttgtgatagtcaacatgtattcctcccatactgggtagcagtgcttttctaagtgctttctatttattgctttgtttaatctcacaacacatttatgagatagttgctattattatccttatttttcagatggagaaaattgaggtgaagttcagttaagaacttcactaatgtcgcagagttagcacatggtagacgcagggagcaaacacaggccatctgttcatgtagcctaagcttttaactgctacgccaactccactgcctcagggaacaactgggcatggcacctacatttatgtgaacccaaccctccaaattatgaagtctctgtcatgctaattatctgcatgagacatgagacatcaggcacttaaaaactcaccattacagggccgggtgcggtggctcacatctgtaatcccagcactttgggaggccgaagtgggcggatcatgaggtcaggagatcgagaccatcctggctgacacagtgaaaccccgtctctactaaaaatacaaaaaaaaaaattagcctggcgtggtggcgggcgcctgtagtcccagctgctcgggaggctgaggcaggagaatggcgtgaacccgggaggtggagcttgcagtgagccgagatcgcaccactgcactccagcctgggcgacagagcgagactcctcaaacaaacaaacaaacaaaaaaaaaaaaaaactcatcattacagaagagggaaaataagggtgtgtgtatgtaagtatgtatgtatgtgtgtgtgtttatgtatgtctctacatcaaggatgtagaggttttactttacttccaggccttcctgcctgaccaaaatttaaaagaggagaaattatgatgtcatgtaatcatcaagttcattatgtcacctaaaagaaatctatcaattagcccaattatttaatcaaggatttgttgtcactttaaaagtttcatcagattattttacctaaattataatgtactctgtggagtctcagaaaatgtgatcttgttgagtgtttcttccaggttggtaggttggcttttcaccttatatgcaaatttaaatcaaacattgattagtgtaggagtatttctgatataacacagcatagatgttcttggaaaacctcatatgcttcaaaactgtgcactaaaaataaaaggacttagggaaaaaatgtgtttgagtgaaatcattcaatgcttacgagcactaacaaaagcaaaaaagaaaaaaaacaaaacaaaacaaaatccccaaaatataaaagtttagttaaaagatacattgaattctaatgaatactgcacctcagcaattgtaggccttgacctaaggggaaaaaagtgaaagtagttggtaggaaagaactataagacagccttgagtctgctgagttatggagacaagagaaaaatacaggaaaattgtccaacagtacttctacgacagagcatatggtcagactgggctaagaggaagaatggggagcaaaggggatctagcatgcctgcattttatcctgacattatttccctagcgatagatgtgcctgagccaattgacattcctgaaatgtacagtacttatttgaaaacagataaaaacaaaatggctttttacagagtaaaaaggaattacatttcttccttaactcatttcataatcattactatattttcagtaagtatattttaaagtgactaagcctctgcaaggaactattttagcaatgtaactatgatgagaatcatagaaaaagatgcaagaaattgttttatatattttagggaaaattggttgaaaagtttatctgatttcctcatgatcagcatgatgcatcataagtagtgatgatacttaatttgaagatgtttaactgcatgtattcaaattgtagtcatcacacgggagagtttttaaaatatattttaggatttataatcccaaaggtttttctcttaaattagttataaaacattctgtaaatactttgataaaaactgagaaacaaaatgtgaatttgaatacttaaaatctccctactatagagttgagtgtactgaattttgctattatttcaaagatgccacagaattgcctcttaaatctaattttaaaagattgtagattgcactcatcttattttaaataaagatttaatgcagcttattaaacacaatttgtgtccagtactgtagttttatcaaggcggttgccacccggcgagtcggggggcaggggcactccaatatgattattgaaagtgaggttgccgttgtctttagagttgacctctctgttttgggagaatcatcagtatgggctcttgagttacaaaaatttaaggtaagcatcctcctctttaaaaatagcttgagacagctcacacttacatgtagatgcagtccgttaggaaggtgaatgccctactcagtaatagaaattggagtgaacaattactgggcttttgaacaaggagaaattgcttcccaaaatgagattttaacagaagaattggagtaacctaactcccacaaggtgttatataatattagaaatccaagctctaggcttggttaagattgaataaccagagtcatgggaaatgtattatggactattttgattgtgcactatggtccctagagtttttccttggctgggatattgagaagtaaagtcagaggaatgtgtcttccctctgctttggtccccacacccagtcagtagcccaggcctgcggattctctctcagaattacttctgcaattgattcattttttccccccagggtcctgtttttgcccaacccagatctaccatctgtcctactctgacccatttttcattctacattccaaataatcttctaaaaatgcagtctaattcacttactctcttgcttattagttatttagttgattgcccttagaatagagtattatcttgtttaatgcggtttgtagaactctgcaaaatcctgacctctgtctattttgtctctcaccaccattatcttgctctgtcttaacctcattcatgcctttgctacactggaattacttctgttcctagaacattggctcccaagcatgctgttctttctggaactctcttggcctgacgcagctcagatgtttctgagaggactaggttcagatctctgatttacattcccagagcactatatccctcccctttttgcagcagaggccacccttggaactgatacatcagaaatagttttcctcctggattgtaagttcttgagagcaaggggtgttctttacacatcactctgaccttgtgtctagaaaaatgcctggcacagagcaagaccttcgtaaatatttgttgaataggaagaaaaatgaacaagtgcatgaatgcgtgaatgatgtagaagacaatccagtaataccaaagaatctattggaatcaaaattattaaaaagaaaatgcagatgaatggagaatttatgttaaaagccaaaagagtcttgagctttgacttttaggcatcatcaaatttaataaagagatatcagtaacatactaaagcaaaagccagatggttttgaacttaagaataaatatgatgtaaggaaatgaacacagcccataaagccaacctttcaaaaagagtaacaataaagggagaatggtagtgctagagaggaatgatgggatgaaggagtctgagatttgtttgtctctttttaactttgtggcagagagaattggacatgctcaccaatttttctactactttgtcctgctttcctgatataccacagggaaagttctataaacatttcctactacaaagtgaaaagaaacctattttaaaagactggtttatgggattttatgtaatatttttcaatttttgagtaaggaaaactttctaagttttcagtctacctgaaaattaagcctttttccttatttatgaaaatagttgttacaatttgtactgaagtatacaaactttatccttactaaggcaatttgcttttaagttttctcctccttttggctactcttaaaaatctggactttcaagtttaatcttaaaaagctcatatctttttaatcacagatattggcatgtccaggtaccaggtatgatggtagacatttgatacagctaattgcttttgtgatggatacataatttttaggcttgcctcttccctgtaacttttttcgatttttttattatttatttatttcaacttttattttaagtttaggggtacaagtgcagtttgttacataagtaaacttgtgtcatgggagtttgttgcacagattatttcatcagccaggttttaagcctagtacccattagttatttttcttgatcccctccctcctttcaccctttacagtccaaaaggccccagtgagtgttgttcccctctatgtgtccatgcgttctcattgtttagctctcacttataagtgagaacatgcggtgtttggttttctgttcctgggttagtttgcccaggataatggcctccagctccatccatcttcctgcaaaggacatgatctcattcttttttataactacatattattccatggtgtatatgtacgacattttctttatccagtttatcattgatgggcaattaggttgattccatgttttactattgtgaatagtgttccaacaaacatacgtgtgcatgtgtctttataatagaatgatttatattcttttgggtgtatacctagtagtaggattgctgggtcaaatggtatttctgtctttaggtctttgaggaattgccacactctcttccacaatggctgaagtaatttacactcccacgaagagtgtaaattaaaaagcattcctttttctccacaaccttctcagcatctgttattttttgactttgtaataatagccattctgactggtgttagatggtatctcattgtggtttttgatttgcatttctctaatgagcagtgatgttgagcttcttttcacatgactgttggtcacatgtatgccttcttttgaaaagtgtctttttctaacttttcatctgctccttaagacctgcttttggagaaaagtgtatcagtgccagagagtgtggtaaggggtgttttccttacatgatattgttacatgtctacatgatcttgttacatgtagtaaacaagatgttcatgcctaattgaattctaggatgggcatggtggctcacgtctgtaatcccagtgctttgggagactgaggcacgtggatcacctgaggtcaggagttcgagaccagcctggccagcatggcgaaaccccatctctactaaaaatacaaaaattagctgggcatggtggctgccacctgtaatcccagctacttgggaggctgaggcagaagaattgcttgagcccaggaggcggaggtttcagtgatccaagatcatgccactgcactccagcctggatgacagagtgagactctgtctccaacaaaaaaaaaaaaagttcatgcttcattaaattttaaattctagagtttaaatgattgagggttgccttacttgcacaataatctgtccctgttattaatactaggccagtagctgggtcattattctcaccacggcaaagttaatcactcactagtaaaaagagagtgagcattaagtttatttggaggctgtttaattatcaacttttggaatgagaagtacctcttcaagtttctgagaacatattattccacttcttgccaaggcctgtcgccaaatttattattttaatttatttgtttttcccttaccatgttactaccatctctacaaccaactatgtactgaattcacccactgaccaaaccatttctgaagttactgctaacgttacccataaaaatcatcactagtttacttgaggaacaatcttttgcctgccaggaatattctgtattctgtattcctggcaggcaaaagcaagacaaacaggtttccaaggtatcaacactgcgtgcatctgcttcatagtgtaatttcatcagttgagcagatgaagaatgctaattagtttgtttatacatatgtaatttaatgagactaaacacttaactatcttaaagtaagcacaacttacttcctgttggctgtttttgctttaataaaaaacactgttcggcttatttcctggaaattatagtaccgtgcagtacaggaaaagaaattatttcaaggaaggttgactggtcaattgtattctactgcagctggattcagtaggaagataagaattaaaatattgggcttgggtaccagcgttgaaatccaatgtgaatgagagagttaagtttaatggaaagatctattataaactatattatggcaaacttctaagtccaatactaaaattctaatatataccagaataattcgttttagtaataattctatgccatcctcagacctaacctataatcttccatttcttattgtcttccttttgtttttatgtacccttttttgctagttattgtagttagattttgatataactgaaatagtggcattcagttaataaagctcttttccctgaaaattaatacaaaatagtggtactattatttgtataaatagttatttagtattatctattacactctttttgattactttgaagttgttcaaaaactggatcccagccaggcacagtggctcatgcctgtaattccagcactttgtgaagccagggcaggaggattgcttgagcccaggagttacagaccagcctgggtaacatagtgagaccttttctctactaataataatgaaaaaaactctccaagctccccaaccccaaccaaaactggacctgcgtaggctgttatttttggagaggagtgactagaggagatgaggaaataactttgctcctatagtcaaaattatattttaattaaaatgctttagttaatatactcggttttctacaaccaggggtcagcaaactactggctatgttcacagtctgcttttacaaacaaggttgtattggaacacatctgtgcccattcatttgtatatcatctctggctggcttcacactgcaatggtagggttgaatacttgcaataaagaccatgtaacctgcaaagctgacagtatctattctcaggccctttacagaaaaggttaaagcacttttaaagcttaaagctgatcattgatttgaagcttaaatcagaagagaagttattaaacaataatagaattatgttgagatgtagtaaagactaagaaacaaatatttattacattaagtcccaaaacaaatgtgggtaaaattattagatatttaggttttgtagaacctaagtaatcattccccctatagccatattacctttggaccacttcagtagtctattgaggtagaccgcttccattctgttctggcagaacaaattttctactcataaatgcataggattttcttttgtcccttcttgaagttccataaattatatatgagcatagattttgtttataactttaggtaacagagccttggcagcttcttctggcctgccagcatccataatcttcctctatacctaatgtcccatgacatcccatggggatcagatactgaatttagcttccttgtttgtcccagttcagaaaatgagttgttcattgttctaaacttattagatgacttacatgtgacaatttacaggctgttgcttatgggaacatattaagggcattgaggagcatagaaaataaaaaaaaaaaacctaattgaacttcaactctaaagattcaaatataaggctgaatcttggatgtttcagataccactagccaatgaacaggaaattatgttcctcactgaattttaatataaatttgtaaaccatattttgaagataaaaatctaagttgattaacaaagcccgattgtgtagaaactgctctaatttagtaatattagtttggagttatagaaaacacattggctttggagtcagctgaatctgcatttgaaccctagttcagtcattctctagcatttgaaatgagagaaaactacctaaacttttgagcttctcacccattggggataataatacctgtgttatgtggttgctgtgaggattaattgtaaacatagagttcccagcactgtgtcaggcacatagtacttagtacatgtggggattagcaaatatgggttcttttccactctttgtttttcttccccaagagtaggaaatagctggtagacccagttaatcaagataattagtattgttgatgaactgaattcacaacttgacagttccagtaacaaatagctaatgataaatgggttgtgaattgtgggagaatttacaaccacagcatcaacaaaaacaaaagtactgggggaaatatgctggaatggcgatgcttatgatttcagtgggaagtggggtagtctttgactcaccgcagtctagatttgtttccagagacccctgcaaatcccatggtatgttcttggggatcaggagttctgatgtttttttcattttgatgataatatttttaaattgctttaccatttaaagtgataaaatttttcttttgccataatcatcttcattgaactttttttcattgaactttttttttctaagttggtgtttcaaatctgaaaacatatacttggggatcattatacatattgttttgctttaggtatttttggaagccattggtttttactgttctgacttttcagaaaggagagcataatgagaatgtagtagtacaagcatgaataaaacataaacttagatgtggcttttgtcataaaaccgtggtgttccactcttgtgaaatcaaactggaccagatgagtgtaaaaaatggaaatcagtagttgatgctaagaacattttggaaaaatatattttattttaaaagttaaaatagtaagaggaagtattttgctaatattgtgaaattcacacatattaagtaaagatctttgccaaatgtcctgctcattttataattggcatttccagcagaatttttttaacttgagaatgacatgactattgcttttgctcacctgtctttttctgttttcatccgtgcataaagtcactcctctttctgttctgactttttgctgtccatagacatcccagttaccagtgtccttgaattgatagtggcttctgtttgtcagtctcatataagaactacagctcatcaggaggagatcgcagcagggtaagagacaccaacaccatgttctgcacgaagctcaaggatctcaagatcacaggagagtgtcctttctccttactggcaccaggtcaagttcctaacgagtcttcagaggaggcagcaggaagctcagagagctgcaaagcaaccgtgcccatctgtcaagacattcctgagaagaacatacaagaaagtcttcctcaaagaaaaaccagtcggagccgagtctatcttcacactttggcagagagtatttgcaaactgattttcccagaggtgagtgcgtgctctttagattttgaaattgtaatactttgaaattgtagaagaatgtttttccaaggaaaatttaaacacttcctttctcactttcaaggctacaataaatgtagaatattttcttgaaacacataaaaatattcttttaaagcaattgtgttcttaagttgtgttttatcttaaaatgtttatgatcttgaattcttttcaaaagaacactgcagtctgacaaactttatgattttgggcaacaggcttaatgcctctttacctcagcttccttatccctaaaatggaaataatagtagtacccaccttctacagttttaatgagttttaagtgaaaccatccatagctcttgccataacataagtgatcagtagttgttagctattatcttaaaattaaattcttcaaagaataacttattttctgctcaaattttctctcctaattttaaagagcatcatacgtcccctgccagttttcagagttgtgaaaatctcccttggccacttgctctgattctgaagttctgctcaagccagtcttgactttctcccttgggtcggagtcatgagcctgtgattgcctacacctgcgtgttattaggtctcacacttcttcatatagccctgcaagctgcatagcatagtgtcatgttgagatctagagcaccttctgtcaatccaccttgaaggaaacttctgggaagaggacacagacctaaataaatagaagagcagttgaaggtcttcatgatgtcttcctccctctgtcagtcttcatagttttatatagatttgcttaacctatgaatttggctggacattgacttaatcagacaccagctaacataatacattgataatttttaattgactcaataccaaccctctactgtgtgcaaagcaccaaagaaacatggactggctgattttcagaactgaaaggaatttaacagataatcttgtttcactcccaggaagtgctagggaagttcagtgacttgaccaaaattacacagctttcaaagggtagagcaattaattcctgctgtaaacagtccaggctggaatgactgagaaagaagaaattgaagtttgaaagatggataaattagacttagcagaaagttgagggagtttatttcagatataatattaacacaatagtactttggcagataacctttgaaatggaaatgtttaattattcttaccacactctagttgctagacagccagcattggctaggataaaggatagagccctcctcagggagttggtttgtagcacagtctgggaaacaatcggtgctctcatttcaaggacagagtgaaatgaacagaaatgaaccaaaggtgatgatgaggaagctgagattgcttctatgttttccctgaatcctgtccttactatgttggctttatcattttgtttggtaaattttgaatttctgcaatggaagtcatacacatattggactcttttttaaaaaacattatggttcacctccagcctgggcgacagagcgagactctgtctcaacaacaacaacaaaaaaattctggttcacttgatggtgccaccaaaagttccacaggcttccttcattctttttcattcattcttctttttgcccttctgactgaataacttcaaatgacctctcttgaatttgctgattctttggcttaagtctgctgttaatgctttccattgagtttttcagttcagttattctttcattccagaatttttacttggctctatttttgtggttatctctttgttgatgtttacattttgctcatgcatagttttcttattttatttagttgtctgtctgtgttttcttataacccactaaatttcattatattgaattttttgtcaggtaattcattgttcttcatttctttagggctggttactgtagatttatttatttatttatttatttggttgtatcatatttccctgatttttcgtgtcccttgtagctttgcattggtgcctgcacacttgagtatgcagtcacctctttgcttcttttcagactggttttcacaggaaaagacattcaccaattggctcagctagagattttgagagcctctcaaacattttctatggatgtgcatgttccattcctctcttttcctgctgagggagaagtttctgggtggtgtgccttctcctgatcctgaagagccatacaggctgctataaacttcccttctctttttcctaggaaaatgtactgaaagactaggatgcaataccaaattaaaattgtatataaaaaatttagtagtctatgttgtttgttcatgagtttgtaagaataagcattaagatttgactacagtgtcatgtaacagagagggcaagactataggagatggaagaggtatgtttggcattagtaactaaaactcctctccaactgagatattatcgttatggcagtaaatgttccagtgttgaatacatttgagctgtgtagtcctcaatctagatgacttcaaacatctgcttatctttgataaatacttgttatgtttttttactgattatttgttaagtttatagatttaatgcttagactgctatttagtgtcagttgtattaataatacaaaagaagatatttaaaatagcatttgacatcacaatttttgttttagataatcagaattaacttcctggttatatttttattagtgaacaggcaagtataaaaatgtattatccttagaaaatgtaacatgagagaggtcgttctcaagtaatggaatactagagctttaaaaagtcttcttgatcatctaatgcaaacttatcatttctattttaagaaatagagacacataaatttagatctcttgcttaaagcaaaagataactggagaaatggaaaactctctgcatttcattcacaacccattgctcttcataatataatattgtttgctcttttttcatgggtattgtttcccaataattctgtaagctccttcaggcatactgtcttgaaggagcttttaatggagccacagtcaaagcaaatcagaaaccacttactgaattgaaataattgaattggatatgcttacataaatgataagatcccaaatcaagtacctagtaagagtaggatttgaagagaatcacgaggtctgtagatgtgttctagaatattaggttgaaagaagaaaaagaaacagtattacaatttatcttatgaattaaaatattattggtctagaaaaacgttaagcactgtaggaaaattaaaaagccaatgaaaatagtgacttatccataaaccacaccaatgatatttttattaaaattcacattgttgacagcaatgttgcatcaaatagcagtttttcctgaagtattcatatatggtatatttgtggcaaaagtacttgttttaataatttaatcagatctattctttatgagccaaaagataattgtttagtcaagagaaacaaacttgagagcactacaaactatttgcattggggaacaagtgtcccctctgtgaatcagaaagtccacaatctacaatacttcaggttccagtgattgtacaaataagaggatctgttcccccaaaattcaaaataaaggctttcccaaatagtagggtgttttagtgatagacaactaaaagatttacaaaagactgctacacaatgtttacatatattgaactgtaaggaatgaatttggaaggaaatattggatttagttctaaaatctgaaaccaaaaattaatatatagaattgttggggtatggagcagtcctgaagtggttgattttatgttatgaggccctgaggttggctgtgtgtgacagatctcacttatagttgaatcctgcttataattttattgtggactcatattatctcagggtcaggatatatcacaggaagtacagcaccaaggtaggaaactcgatgcaccagcagcctctaccaataaatattctgcctggaaaacatgtgagttctgtctcttatgggttttgttttgaatttacaaaaattttccagaagagcaatggtataagatgaatgtcaatttccataaaagcctattcactcataatattggtcaagtatgctactaatgctttgcacggactttattcctttttttctttaggaaaataagttttgattcaaaatggaaagccaaacatacatttgctccaccaaccttagcaattggaaggggaccatttctcctcccctcttacaatgatagtgtatacgttaggaggaaaagaccagaaaaagacatttctggtggcagtaggaaggaaatgaaagacaaataaacatcttgactaaaaaggtaaaagagtatacccaatggcttaatcagagacataaagaggagtggagtatctccagtagcatggaagaggaagaagaaagcattcttcagtggcagaattggttgggttttctttctccctggcccacaaaatgttcctggtcagggcgagcatggtggctcatacttgtagtcccagctacttgggaggctgaggcaagaggatcactggagctcaggagttcttggctgtagtgaactgtgatcaccactgcactccagcctggatgacagagcaaaactctatatccaaaaaaaaaaaaaaaagaagttcctggttcaagaagcaattaatatatatataaacaaatataattgaaatagtttacattggaaacaacctaaatttgtttgtaaacaagctaagagagtaacacctctatatctggctttatcacttcacagataaaattttatagattaagccttcaagactttgaatagctggcaggtggacatcattcattcattcattcattcattcattcaataaatatgtattgaacatctcctatggataggtaccattgtaggttttggatggaggggtaagcaaaaccgacactctctgcccttttggagcttctgttgtaatggaagagacagattatgaaaaatttacaaagttggcgagcaaatgctatgaagaaaaactgagagctcaggcacaaaggcagcaacccttattttattaaagacttcttttttcatatgaatgtattttgcaggaacaaataattcatagccactcatgctttcatggatttgtatccacattgatactctgttaactggagtaactttctactgtaccaagtagatggttcttgaaatatttaaacatttcaagcaccctggctgatttacttcatgtatagtgtcactaatttaatgttaccttcctttttccttgatgagaaagatgtctaggaaatatgcccatagtttctttcttgaacatgtttctcaactgccctttgcctttacatagctcaccaagcccgactcagaatctgccctctgggtgcgtcttccaccagcttttctttcatcctgtggcagatagtatcctttctctctatatctgaacagtctgaaaaattgttccacattgtaaatttaaattctctttaattttttttcagcaattgtgttttctttcaatacatttttaaattttctttctaagctttgtatgtgtatatttaaaactaaaagcccttttcataactcatgtcattaaaacagaaccttgatctattttggtttactccagtacctcacttgactggtggaaactctacaagagatataaatagtttttaaggaaaaaggaatttcttaacttgggacagcaaaaaatttttcactttcctctggggaaactatagaaagaatcaatggttctatatatataatatatagttttatatatatctctatatatacacacatatatagtgagagggaggtacatacatagatacatatgatttttacatggaatatataaaaatggacaacactgcttatcaatgctctactttccacttatttattagagacaatcagctgttaagataaattaatagctactcaacatgtatttattaagtataaaagcttacatacaaatgtcttgcaaaataaggaaactcatgaaattctcagaaatcaataaaagaaaataaaaccataagtatttgatgaggattattagttcaaagaaaggaaatcagtgtaagccaaggtaaacccaaggctcatttcaaataaatgatcaactaactttggtgacagattagatttaagagatcaaaaaaggaagagacagagataactccagagtttgctagacaagaagatgatatgaatgtatagttaagggcagagagtcactggggcagctgggtgtggagtttgtgaaaggaacagaaatttgcttggcttggtccatgctgagattgaagtattggccgcccgtccagagggatttcctgactcagaggaagtgatgcccatggaatcctatattgcagaagacctaacactaccaaactgaaatcttctgtttgggttcacactcagctcaactattctgtggctgtcagtgagaccaccaccaaaggctaaacctgtgggccacaacacatatccaatctcagattagtctcagcacattgcttcctctccagtttgaaaaacacatagaaaatcacttccagtttccaaagtgaaaattcataacatttatcattcaagcaattgtataatgtgctttattctcgaaaataaatcttcaggatgcatttttaaatatataattccaaacaaattattatataagggaatgtttaaaacatttcttttgaactttcagtttgaacggctgaatgttgcacttcagagaacattggcaaagcacaaaataaaagaaagcaggtaagtcaaaccactttagttgtgtgaacctcttattacaatgactaatactgctactaatggccagcagttactgaatgtgtcagccctttattgaatcattgtggtatgtcagaaactggacttagtactttagctgatactaatttcaaagtaagtgcatctatttatcacattttataaatgattaaactcaggtttatatgaagtatttagaattttatagccgtttaaggaaaagacagagctggggttcgagcctgggtttttcagagccattattttaagcatgtagttataaactgctgctttaacaagctcctgtaaggccgattcttttgtactaattggtaacttctaaaatatttaacaacaggtaagtcatggatcccaaacaatcaagacttcctgcctgaaggatgctgccaaagttttgagcagggtcccagcaggtaccccatccccaacacacatctcaacaacatgttaatactttagtatctgcatcaggaggaggtagaaggatcaagtgcttaagaggagggggactcagggttccggggggtagcagctgtttattaatccttagggaagtgtttctgtattctcctaactagtttggttgcactgcagaacatcagtttgtttatactttttttctagtattctttgaaattttcctttaaagcatttctgaagaggcttaatataaagttactttttattttttattttttttttagaaacagggtctcactctgtcatccaggctgaatgcagtggtgtgatcatagctcactgctgcccagaactcctgggctcaggccatccttctgcctcagcctcccaaaaaactgagattaagggcatggacctaaagttacttttttaaaatttatttttatttttttgagacagggtcttgctctgtcgcctaggctggagtgcagtgcaatcttggctcactacaacctctgcctccctggctcaagccattttcccacatcaacctctcgagcagctgggactacaggcatgtgccaccatgctcacctaatttttgttttggtttttgttttgtagagatggggtttcaccgtgttgctcaggctggtctcaaactcatgagctcaagcattcacccgcgttggcctccaaaactgctaggattacaggcatgcgccactgcgccttgtctctaaagttacattttttaaatctgatttatttagtgaatcaaatacaatttagcacatttactgctgacagaaaatgtaataggggccaggcacggtggcaaatcccagccctttgggaggtcaaggtagacagatcacctgcggtcaggagttcgagaccagactggccaacatggcgaaaccccgtctctactaaaaacacaaaaattagccaggcatggtggcagatgcctgtaatcccagctaatcaggcaggagaatggcctgaacccaggagacagaggttgcagtgagccaagattgtgccactgcactccagcctgggcgacagagtgagactccatctcaaaaaaaaaaaaaaaaaaaagtaataggccccgtttttgattccctgaaatttcaaggtttatttggtctataaataatagaataaatactggtgttgaaatttgcagaactgaacattggagttttacaaaccagcactattgtcaggaatgttttaacaattcattcatctgtctcctactcatgagtgatcatctgctctgtggatcatatgtgcttgattttccttgctgactagctggtcccagactgcaggcagcaggaccaagccaagaaggggtcatggacaggtccagaaggaaagagtgtgaatctatgtgtctgacagaagctttgtttacacgagtaacatgagaagcattccagaacacctctgaccttaataaccagtcaagctgataagatagtcttaagtctctcactgtgctactgtgtctgtctgcttaagtccttggcagccagtttactcaaaatttattctcagggctttgtgttctgaatcgttcctacagcttcttgcaatactcagttatgatgtgtttccagcagtgtgcctcttaaaataatctcaaaacttaagccaacaataattatttttttgaaattttgaaatttttgtttaccacttccctgatgtccctaaatataaaaaaaagaaatctgattatacttttaaattttcttgatgagaactattcagttgttgaaacaagatttttgctcataagcctgcctgctgatatgttaagtggttcctctgtgcttttttagttttggggtatcctcttgtttaaagattttttacttcactttcttattggtaagtcactgccgtttttattgctgtcagtttgccaactgctgaacacaacttaactcttttttgtgctgcttattctcttctacgaattgacaaacaaaaatccaatatatcaaccaataaactgcccttgaatgaaggactagagctgcccccctcctcttttttttttttcagtgaatgagtgttagtatagccatcatgtccctcaggattggttgcccagagagttcttgcttagtttctttttctgggatcttttgatcacatcattatatgtatgaactcatgctggtgtgtgtgtgtgtgtgtgtatttgtataaggcacacatgtgttggctggtgcatgtgcaatgcttacacccacttgtattttttgaaggtgagggtaggaattgtagtttgaattgcactatgtgctgtttggacaaactaagcttcgctcatttggcaaattttgtcataatcactcatcactatcagaaatcatcacaaacaattaggcaaacatgaatcaacaagtcgtgcagttaaaactgcaaaaaaatcttatcaataaaaaagcatgctattacagtctcaatttctatgctgtaaaacaagtgcagtaattgcatgaagaataggtttctttcattactaattttttatacaaaatcaaggattaaagtttaatataatgatatctgagagataaacacagccttaaactaagaagcaaaagattctatgtatttgctttaggaaaatatataatattacttaaaagtgaattctatctgtatgtaggtttttcttggttatcagaattaccatcctcttcttggccacttcacatttgaggttgctagccagggaaggttctcctgagtacagagtctccttgacctacagtggagttacgtccagataaacccatcgtaacttgaaaacaccctaagtggaaaatgcatttaacacgcttaacctactgaatagcttagccttgcctaccttacatgtcctcagcaacttaaagtagcatagagttaggcaaaatcatctggcaacacagtgcactgtagagtaccggttgtttaccctcacaatttcatggccacatgagagctgtggctcactgccactgcccagcatcacatgagagcattgtactccatacctgtagcatgggagaaaatcaaaattcaaactttgaagtacagtttccactgaatacttacagcttttgcaccgatataaaggtaaaaaaaaaaaaaatcctaagtctgagactgtctgtattagtctatgtaaagttcactttaaaggtaaatatttcttatgaagaataacaaaacattctatgtcatatatattttggggttttccaacattgttctggatggtatatgtcattgctcctttctcataaaattgatagtcaagatttgcttctacagaaaagggaatttaaactattttctttctttctttctttcttttttttttgagacagtttccctgtgttggccaggctagagtgcagtggtggctgatctcggctcactgctacctctgccccgccaggtcccggttcaagtaattcttctgcctcagcctcccaagtagctgggattataggcacacgccaccatgcccagctaatttttgtatttttagcagagatggggtttcaccatattggccaggctgctcttgaactcctgaccttgtgatccacccacctcggcctcccaaagtgctgggattacaggcgtgagccgctgtgcctggcctaatttaaactattttctatcattgtttctgtatattataatctgaacttttagcatgtatttataagtttataacttaaaatattgaaatatttccaggaaatctttggaaagagaagactttgaaaaaacaattgcagagcaagcagttgcagcaggtaatagaattgtttatgtaattagaaagtatgccatatacctgtagaactcacattttctccaaaaatattcatatttatttgttggtgactcccagtatgaagtgttcaatattatgtattctgttaacgtaaagagtaactctttttgatactatatgtttttgtttgacctaaaacattttctctgtttatgtttacttgctgaggagtagataaggctagatgggaagctgtctcacagatattcacaggctttgatcttgaacctaactaactgttcctcatttatacatcaaaaattctactcaacaaggtaaaataaagaatgcttttaaaggttaggagcagtcatgggaaaaaagttaacagtattctcacattaatgattagtttgagagaaaaaattgatatgtgactttgtcttgctgtcctttccaaagtttcagtacatgaaccacgaggttgcatctttctaaaagtataagatattgataataataataatgactaacgtatattgaggcccccctaggagcaaggccctattctgaatataagccccacaacagtgctatgaagagggcactattctttttcccacattacagataagaaaaaatgtggtactcagagtgtaaagattaaaggagattatagaaagggaagatcatacagagcacccttgacataactaactccatctttaaaaaagactccattttgtattttgtagggcattttgccaacaaaaatagcatgttttatttaataaacaaatttaaaaaaatgaaaactacatacaacaagataaaaacacaaacacacttttccactatcagttctcaccagaggactctgtaactataaaaaattaaaccttcaacaactcaaaacggtcgtcctgacaccttcttacattcactcgtgataaaaactggacatctgccaccaaaggctctgccatctcaaagagtctttcttataagacggcctgacccaaaccaagactccttttgtcttcttcaccatacccaccctcctttgttaattctttctcctatctctttttccttttgatgttaagtgttactttgttacaaaatatttaacctataacatttatattttctatattaattaagcatactattatgtatcgtttacaatactaactgatttgtggagtgacttgagcctgtgtgcctgcagctctaagaaacaagtaaacagaaagtactaaaaaaactgcctcttggcaaggcatggtggttcacgcctataatcccagcactttaggaggccgaggtgggcagatcacctgaggtcaggagttcaagaccagcctggccaacatggtgaaaacccgtctctactaaaagtacaaaaattaggcaggcatgctcgtgtgcacctgtagtcccagctactctggaggtgaggcataagaatcacctaaacctgggaggcagagcttacagtgagccgagatcgcaccactgcactccagcctgggcgacagagcgagactctgtctcaaagaagaaaaaaaaaattgcctccttaaaaacttcatgtaactcatggcttttatgataaaaaataatattaataaaagcctaacattgtaaaaagacacagacatacagaggcttatttctaaccttatagcactcgtgaaaatgctatagaaagtaaattatatactccaagcagacattcattcagctaacactaaacaacaagaatgcgatttgattcaggaaaaaatgctttgtaatcatttctagacaaaactgagtttcatgccagtaattttaaattaacttccgtgtctgacccttttgctgctggaaaccctcatagaggaagatcctcttcatgaggatggattgcttttgttgttaacagaaagattggaggacttttgccaaaatgtacttaatactggaattcaaattattcttttgtagttaggtttcagggagataaaaagttgtgtattatactcaaccggtcattcttttttaatgaactagtttgggatttttcttcagttactagaattttagaagctaacctaggtagataatttggatataggggtttcattttggttggaaatgttattagcagatataaagggagctaaatcagcaaataacgcaagttgaaaataggaataatggcacagctttaccaaggtggcatatttgatatggcagaacatgtattatgtgatttcaggagttccagtggaggttatcaaagaatctcttggtgaagaggtttttaaaatatgttacgaggaagatgaaaacatccttggggtggttggaggcacccttaaagattttttaaacagcttcagtacccttctgaaacagagcagccattgccaagaagcaggaaaaaggggcaggcttgaggacgcctccattctatgcctggataaggaggatgattttctacatgtttactacttcttccctaagagaaccacctccctgattcttcccggcatcataaaggcagctgctcacgtattatatgaaacggaagtggaagtgtcgttaatgcctccctgcttccataatgattgcagcgagtttgtgaatcagccctacttgttgtactccgttcacatgaaaagcaccaagccatccctgtcccccagcaaaccccagtcctcgctggtgattcccacatcgctattctgcaagacatttccattccatttcatgtttgacaaagatatgacaattctgcaatttggcaatggcatcagaaggctgatgaacaggagagactttcaaggaaagcctaattttgaagaatactttgaaattctgactccaaaaatcaaccagacgtttagcgggatcatgactatgttgaatatgcagtttgttgtacgagtgaggagatgggacaactctgtgaaaaaatcttcaagggtaaggaaaacataatactatcttgaatatgaaagctatttcatatttaagagcaagaaacaaaagggtaaaaatatatgcatcacttcaaatgtttgataaaacatatgtaaaacaatggtaaaagaattgtaaagctgtaataaactgaaaacaaaattctttctgcatttgtttgcttacttgattcattactccaaaaatatttattgaatgcagtctgccttttaatatctttatggaatgttttataatgaaatttgataaatgtttatataaaaatgttttcaattatcaaatagctgacttaggttgaataataagaggtattgttttacaacaaacaaaagtcacttgtttcttgtaggaggcaactaaatggatttttaatcaacatttaatagacatgaaaaaaacaaataatttatttgattaattgttaccgaatgtggaagttaaaacatattctgtcatctcatggtagagagctttggtaattatttagtctcaggaaagaaagtttgctaactcatagttgataatacaagcaaagctaagagagaagtttcacacatgtataactttaacagaagcaccatttgttccccaaaaggaaaacagctttattattgcttttctatcataaaaataataaaatatattgagatgtttaaaaaatgagtaatattgaaaggtgtttattgtagcaaaaaaatgaaaaactaattatatacattttttgtttaaaacaaaaaaatgctattttacaactgcttttatcatgaaacagtgtattttgtgcatcctcccatgtcattagatataggtctatttggctttcttggagtcttagtggtatcccatcatatggttgtgctctattttattttatttatttagactgcgtcttgctctgtcgcccaggctggagtgcagtggcgtgttctcagctcactgcaacctccaactccggggttcaagcagttctccccgcttcagcctctcgagtagctgggattacaggcttgcaccaccacatccggctaatttttgtattttttatacagacaaagtttcgccatgttggccaggctggtcttgaactcctgaccttgggtgatccatccgcctcgttctcctaagctctactttatttaactagtaccctactgaaggatatttgggttgcttttggctttttgctgcaagaacacacatgcacatctttgtccacacatgtgcaagtaaaccttcttgtggtccaggatgatcacttgaagccccatctctctcacgacagaaaaaaaaattaagataaaaatcttacctttggaggctttttcacttccatacctgccagatggagcaagtacttatgggagaagtggggaagagaagagaaacatgctaaaagagaaggaagccaaaaaaatagaacaaagaaaaaagtaagagggagggaagaaggaagaaagaaaggacacattttcctgactaccatattatacaaaaaatagaacttcagattaatcaagtgagaccattaagaagaatatagtagcaaaagcatcagcatgctgcttagtgagaaagccttgaagcaagagcgttttgcattgttcattgtaaatcttgatttctgtgtagagtatactctaatatactcttcaaacatctgcacgcattttagaactcatagaaaataggaactataagaaagcaaattgttccttttcagcaggtttaaacacaaagggtttattactgtatctacttccccttcttttgtctcagaaagatgtgggaaacttgaataaaccacaattggttatcctttccttcataggttatggacctcaaaggccaaatgatctacattgttgaatccagtgcaatcttgtttttggggtcaccctgtgtggacagattagaagattttacaggacgagggctctacctctcagacatcccaattcacaatgcactgagggatgtggtcttaataggggaacaagcccgagctcaagatggcctgaagaagaggctggggaagctgaaggctacccttgagcaagcccaccaagccctggaggaggagaagaaaaagacagtagaccttctgtgctccatatttccctgtgaggttgctcagcagctgtggcaagggcaagttgtgcaagccaagaagttcagtaatgtcaccatgctcttctcagacatcgttgggttcactgccatctgctcccagtgctcaccgctgcaggtcatcaccatgctcaatgcactgtacactcgcttcgaccagcagtgtggagagctggatgtctacaaggtaggagtggaccagggaaataattgttttaccagcaaactcactggggaacaagcactgtgcctaggacctgaattataatgcaactgaaaggccacctctgtagggtcttgcaagcccagtcctgggagcaggtatggtgcattcattatgtgggtgttttccagccagcaatagctctgaatctgcccagaaacagagataattgttctgggaggactgccacactgtcctctcaaagaatgaggagagaatggagggaggatagggtgctcaaagaatggaggatggggtgtaggacctgtgaataggagaagtttaatagtgaatctgccacttcactgtggaaaccgagttgaattattaagtgtgagataattcaaagtatggcttatacaaggaaacattatcctttgtatctgtaagagtaaagacacatgaggattataaaaattgcctttaaatagattacttcaatatagagttaacatgatacttttcatggccagttaacagaaatcaaaatcacctacttaaggcatttttgcagcttggccaagggcagagacatttgaaaaagaaagacctatcttcaaatcttgttctctgccttacttgctttgtaaactgaccaagttaaaaaacctttctcatcacttctaagacagagaaaataatattcactcacagagtttatatgcatgaataacacacattatctcccataatcttcatgaacaggattgttataaagattatgttaggtaatacatgatattcatcagtcatacaggatgagccaggcatcattgtaggcactggggatacagcagtgaccatccctgataccttttctttttaaacgtaactactattagtaagagagctaatgaagagatttcaagttctgcctgcttctttagaattaaaagtttttactgatttaaattactttgctttcttttagacattggcactaagaataaagcgtatttctcatttgtatggcttgaatcatcttctgaacttgccacataacaatctgacatttcagagctgaacccaacaggaaataaataaattattgtggaagaaacgaatattattcatgataatacataagctcttgtcttgttttattctagatgccagaagtaaaaccttacttttaaaaattcctaacaggaaagtccaaacagagccatgattcccttggggaaaaagaggtccatgtatacttacagaaaaaataattggcttcagttacgttaagtttgatggcctcttgtggaatttactatatttatttgtagccattttctatcttgagacggtctcctgtcttagaattgtgagaaggaagtctctcttccttgcaaactgctgtaattgctaacagaagtagccctcttctacttttggttatttctatcaaggatatagggtatagtttttaagtatcctgacaagcattttgaaactatgctcctcactgtaaggtataaggacaacagccacagagttccctgattaatctaactagagttgtaactagatagtaaattaccttctatgccagccctcatttctacttttttttcacttctgattttgcttgagattacttcgagatagctgaaaataaatatagaagggtttcagatacacaaaatgtataatcgtagcctaccctatgagtgccaatggctttgaaagaatagtcagcgttatttattccaagactggattatactagggctttatttaattttattttctctctgtctttcttgggtttttggccatttttctgtttctctgtgtgttcatttacccattgtttcagcgaatatgtactggttatccagcatttgccagcatgggtgcgcagtggctacagagctagagggtacaatccctgtgaggaaagttcacatatggagagggagaagagggcacaatggaccaatgccagatttccatatgacgtgacgaagggatgcagtatgcacaaagggctgcaaaagcagatatggtaggcccctaacatcaggtaggggtgggtgtaggacttcttctaattagcctatttattgagcacctgtgatggccatcatgatgagcacttcttatgtactcattgctgagaaaaagcttatgggtggcattgccacctggttcattcattactgggcacaggtaatgtaggagtcaataaactagataaactcaaagggcttacatatgattaggggaaacaaagacaataaacaaatgagtaaatttatagtatttaagtcagtataataatgtgaaagaaaaataaagtaggttaaggggaagaagaagggcagtgggtaaggggtgattgctatttcttagagggtggtaggaatcagcttttctaataaggtgaggttttagcagggactgaaggaaaggagggacaaccacgtggttatctgcagagagattgctccaggagaaaggaatagcaagtgggagcatgtttgatgtgcttaaaggataatggaaggcagtgacattggaactaagtgagcaatatggagaataagaagataaagtcagagattaggagaaagacaggtaaagaagaaatctggagccataataagggtatcagcatctactctgaggggaatttctgaagatttgtgcctcctttcttttttcctttctcaccctcatcctttcacaattgaggctttgtgtaagaataatagggtcttatagttacaataaacatttggagaagaagaaaaatgaagctcttagaattagggggttatttctggactaaaattaactatctgctttttgcagccagcatcacagacagataaaaattgcctgtaacgacaacaataatgatgatgataatgataaggttaatacttagatttttgataatagcttgatttccagtggtctttcaaacaccaccgttgtttttacctgctggttcaacatcttggtttttataattgtgattagtatccattagatatgtaattgctatgaggaccccaagggtcctttagaagaaccgtttctctttactcttatgactattaatatcttggttttacattgcacaattttactgcattgatgtgacatttattgagtagtgacttgaggcaaaatactattttatgatgaggaggatataaaacgagtaaatgatcccaacatctttaaacaatttattataattcaaaaatatattgtttctacaaaaactatcttatatggtgaaaaaaaagagatgaaatgatatgatgagtcagtgtgcaaatctgggagtagaagtcaactgttactgtgttcataggactgtactgcctctcagtgcagtgcctcaatgtaatgggtctaaaccttgcgcatttcctgaaaaagaaagccatttctgggcgtatctgattaaccctgatcctccagaaggcctgagcaatgagaattctgctatatgacttaatttcttctatccgatgtaggctgtgattcttcctgagcatttatttatagtatggaaaatatattatgtctaggtggagaccattggcgatgcctattgtgtagctgggggattacacaaagagagtgatactcatgctgttcagatagcgctgatggccctgaagatgatggagctctctgatgaagttatgtctccccatggagaacctatcaaggtaaggcagatgatatattgtccaaaagatgtcacaagagcaaatgcgtatagttgattaccaaaaccatggtgtatcagttgggggttagttgagagagagagagaaagcaaaatctatatagagaacacaatcttctctaacttgtttacattggaagaaatttattatagggtattaaatggcttacagaatcattgagaggacagaagaacccatctataagttgggctttcaaaaaatgtttcccatagtatagggattttctattgtcaaagtaaaatggcttctaaaggcaaacttcagaacaactgcattttcaaaaatctggaagctgattccaaaactatcctaccaaagccacagtcaggaaactgccatgttcagaaagctgctgcctcttcaaaaccacatctactataataatcagcaagatggcaatcctgcatcatgacttacaaaatgagtgatgggaaaatggactctctactaagcatgctatagaaaacacaaaggcttccacaattgttcttgagttatagtggagattgtgcctgccgaatctcatgcaactgtgcatctgatttaccaagcctaactgcatttagaagctgcaagttagtttagaaaatgtagttttagttttccagcccctggaggagaggatattacatttgaatggatgttgactgttaattcaccaatattttccaaggcacgtgacatttcaaaatttctagatgagccagattccagactaatatctcaccacacatgaggaaataaagttaacatggtaggcattggtttaacagatagaatataagcagattacctttgtctcacagtgaatctgccccttaatttttataggacagtcctcagttgactaccttcagaaataagcctttgaggtattgtaaaatcttatccggtatgctataaaacatatagagaagaaagaagaaatttaaaaacaaaactatatttggagatttacccttaactctctttaaccttaatagaagccatatgtttaagccttcgtaactattttctaagtctattgtcatcccatttatatgtttctgtgcaacatacttttctaaatttaatggtataaaatcacaaacttttattatgcgtggattctgtgcatcaaaaatttggataagtcatagcaggaatacctcgtctgtgctctacaatctatgggacctcagctgggaataccgaaatgggtgagggtgcctggaatagctgggattgcaacgattgaagctggaggattcattccaagactgctgcttcacttacatgtcagattccttggtggggatggctgaaaggttgggttcagctgggattgttagcgttacatgtgatgccctaatatgtattttttatgaggtggttcatgtcccactgaacaagactggtggaagctgcatgacttagtcttggaagacacaccgcaacacttccactgcactctatcagccagagcaatcacaagtctgcccagaagagagagggctcagagcccaagaatcaataggaggagtgtaaaataatttgcaagtatgttttaaaagcatcacaatatctgactttttcagatttattttcgataattgcatttttttagaggaggactatatatttctttctctttctaatttgtttgagggggcttgtagcatcaatgtaaatgttaaaaatatctagactattaacaacattttaagtgattttcacacaaatacattttataattaagatgtgtatgtttggggtgggggaatttatggcatttttgttatttgcagaaatgtatttttagatttttctaagttggaagaattatttatagctagtttcaaagatagttacctgggtaatgatagattagtttaaaagacctataaagggaatcattaatcatacctttttatgcatactaacctgcagccctgggaaatatctgacgtccctaaaagataccggtgaaacatcacagaggcagagtggagagtatttttagtagggaaactttaacatgtatcagaaaggagcatattgtgacttaacatcgtctcatttaatccttataataacactttaaagaggcatctacactggcagacacgagcagtcaagtctcctatgtgtcagtatttggagtcatgtccatgtgacttcaaagcccaggctttttctgcttcttgccctgctacctcttggtatagaattgaagtgaaagaatagaaaatattttctttttttatttttcaaactctatgctttcctttagcacgtcacatgtgcaaatcattcatctattcatttattcccattgatttcctcactaacatccatccagtcaggcttagaaagcagcaggtgggttggtgacagagaccagtgggctgagtgtaaccgtgaaagtcagtaggtgacaagtgaacacggaagcaaacttctagtacccctcctttcctaagcctagaagcttatgatgagaaatgggctatgccacaagtggtctcaaatagaagatgcccttagtaggttcccattcaaacttttcccgggagccagaattctgcctttgcctttcattatttcacagggaagtctgttaccagtgaaaagagatatgctcagggcacgatgtgtgtcttaaacacgttgtgttttaaatcttgctgatgaatttgaaaagctctgtaagaaaatgttagggttgagagattcaaaactggagaaggggaggaaggcagcacggcatggaaggactaggagggacacttgccttgtctgcatcgtttcggtttttacgagcagaatatatttacattttaattatgaaacaagataaaaatgctatggtaaatttaatatataataagctggagtaactaagtataggaagaaaaactggtttaaccagaagagtgctcacagaaagcaaaaattcctcaatctaaatatgctgaagtcatagttgatatttatgagcagaagagctttattctatctatctatctatctatctatctatctatctatctatcacttgctaaatgtgtaaattaatattctcctaaaagagacaaagccagatatataacagacatctaagttttgcttgttaaagtaaaactttgatgaagaaaggtctttaaaaataatcaaacccctgcattttataggtgaaaacatgatcggagggaagtaaagagacttaaggaagccagactaccagttactagtagagcttgttagaatacaaagttcctgattcacagtctagtgcttttgtttgaaaattttgtagaactcatatgacatcttaaaagtaaatgagtctggaaagtttctagcagatatctgaaattagttattaaaactagacataactgaattcttctgatttctaaattatatccaagttactgagttcttggtcttcattcaaaacgcatacatctaatacaactttttaaaatggttgagtaaacaaagagtttgaaaataattaacatggtatcatcatcatttaaaatatctccactttagcttgttttgtagtagcagtaatttaagtgtttgtgaatcttttaagatcatcaagtaatcagacctttgaagattccattgttaaatatcctgctttggctaggcaaggtgacttacatttgtaatcctagcactttgggaagttgaggcaggaggatcacttgagcccaagagtttgagaatcagctgggcaacatagcaagaccttgtctctacaaaaaatttaaaacttatccaggtgtgatggtgcatgcctgtagttctagctactcaggaggctgagatgggaggatcatttgggcccaggggttcgaggttacagtgaactatgatggtaccgctgcactacagcctgagtgacagagcaagactctgtctctaaaaaataaataaaataaaacattctgtctcagtggctttccaaatcattggagacttccagaattcctaaaattttgccacaacacatcccagactgcctcttatatctaggcatggcacaaatctgatctttcatcagtatggatttttaatttcatgtatatagacattgtcatcgtcattggactcaagtaccttccactttctgcttcctctgtcattttctgcttaaatattacaatttcatttcctcagttgtaagtcattagaacagtgggatagtgtttggtataaagctattttgaggtaaaatgtctaaaagatatatttaatatccttagagctagcttcatttgcccttctttgtcagtgtttgggaaaatgattccaggagtccagaaattatgtctatctcacttgaatgagaggtggcagtttcacataaacagctcatatcccccttgctatgttgctgtggttactatgatccctgtgcatggaaacttgtttcagatgttgaagacagacacaattaagatggtttgtgtaataaacctaaatggaaaagagttaagaagtgtgactgttgattctgcactagtaatttttaattgcatgtgaggagtagagggaagttggctgaaggttttgaggaaaggggtggtgtcctgagggtgaatggtaaaataatttagacggtattcaaacgacactgacgagtaggaagtgttttaccagtgactgggaacatcatgttattttttgctttcagatgcgaattggactgcactctggatcagtttttgctggcgtcgttggagttaaaatgccccgttactgtctttttggaaacaatgtcactctggctaacaaatttgagtcctgcagtgtaccacgaaaaatcaatgtcagcccaacaacttacaggtagtaattatgttaaacacctaaaatctcttgtttttatttatatacaattgccatttgccccactgatttgattcattcttcataacttttttcttccttagtcgtaaggaaaaaagaaacgtgataacttttatcatcctcactttaacttttttacactgcttattagcctcctaagaatgacttgcctgaggtgtttgtggcccagccataaatccatgacagatattacatagtcttccatcattcttcttttagaagcacatattaatactcttagtatgttgataggtgttctgacatcaactagtacactgcagtgcagttctggcagtaaacacccagactcagcacagtcataaccacaagttacagggcacagaacccaacaagcctgcccttaattcagatgccagccacccttcaggacctaagtatgcatttagacgactgagctacaattttgggggttcccatgaacctctcaagttagataattatctaaaatgactcacaatacttagggaattgctatacttactattacagttttatttcgaaggatacaaatcagaaccaaccaaatgaagaaacagtttgggtaaggtttgggagggtcccaaatgcagagcttccatagaatcagaacttatctccctccagccacctcagtgggttcacaagccaggaagctccacctgattgagctttgagtttggtgtatggagtcttattgttttcattatgtaggcatgattcgttgaatcattggccatgtgattgaactcagtcaccacccccactctcctccccagaggttaggctaacacaaaaccccaaccttctatccacaagattgatttttctggggccctgcccccattctgagtcatctcattaatataaactcaaaagtgatccaagggcctcatggaaaacagatactcctataactcaaaaaatccaagagttttagaagctccctccctgcaatcaaggacaacagccagtcaaattccctatcatacagggaagaatttaccagaggaaaactagctggtcatcgagcacttttcaaagattgcagttttatggactggcagcaagtgttaacacggtcagaggagccacgtgtcatctagcatcagaagaacctttattttcactgtcgccttgacaacatgtagtatacagcctgagtcaataaaatctaccattttgttatcacttatccacctttaaccggaaaataaaccaatccgtggtaactagaaatatatctttcatgtacattttgtctcattatattggaaactcttaagtaacaaaagagtttttcagatctatacagtagctaaattatactaagcaagttagctttcctattctcagagataactctttaatagcatcttctcccttcttcttctgcatttatttatttatttatttatttatttatttatttatttatttatattttttgagactaagtcttgctctatggcccaggttggagtacagcagctcagtcttgcctcactgcaagctctgcctcccagtttcaagtgattctcctgcctcagcctcccaagtaggtgggattacaggcgcccgcctccacgtctggctaatttttgtatttttagtagatactgggttttgccgtgttggccaggctggtctcgaactcctgacctcaagtgatctgcccaccttggcctcccaaagtgtaggattacaggcgtgagccaatgcacctggtcttctcccttcttaaggcaccagcatcctttcctttccagcccagactctcagttgataatcttgcctcatatttcaccaccagaatagaagtcagacaggagctttgccatctttgtgctgtaggttctctcagcagagctaccccagtactcatctcctccttctttgttcccattacattggcccagctcccctcctgcccctggttgatacagttttactctcagtgctatttcctctcaccttctcaataacttttctgtggaaattaactctctatgatcaatttctctttgatgaaatgattattcccaacagaatacaaccatatctattaaagctctgaattgaaaaataaaaaattccttgtttccaagtccggcttctgctacaattttcaatttctgctctgttttatagcaaaactgaaagaagttgtctatactcactatctgtattttttccacctcttattttctcttcaactcactccagtcagtgtttactccactcaaacggttcttatcaaggtcatcattgtgccctgctaaaataaaatcactgtcagttttctctccttatcctctcagaagcatttgaataggctgagaactccctcatttaaacattttcttctttaaatttttggcaccacattcacctagttttctcactaccccatgtctacaccttctcagtgtcttctcttggtactccttccctaccaaacctttgttgccgtgctcagagcctcttttcctgttatcttctgtatctgaacttttatgactctaactattttttaaaaaaaatctttcgcccatcctgtgattctctgcagagctacagactcatatatcctattccatatttccacttggatgactaattcacatattaaaatgaactggaccgaattagaatgagtgatttcccacacagactgatgaaatccacttcccacccaggcaagcttaccaatcaccttaaaatgatatcaccatccacctagttactcagaccatcgaccttacagtgatcatttcttctcctctctttaaagagacactccttaactatcataactatagcaacaaccttctcctcacataccctctcattatcctatttcatcttctcagttcacacctgtatctgaaattgtcttatgcagtatttatttatgtgttgattgcctgcctccctttttagaatgttagcttcctgtggtacacattccatattcccagctcctagatcagcgcgtgaaacacagaaggaaagcaagaagtatttactggttaactgttgactcctgggtatgaaaacaactcagtataacctgagaattggaaaaatccctggggttcattgtaatggtaattggcctatggtcctactgggtataataggtagggataagaatccatgccttgagataatatgattctactctctctgtaggcattaagaggaatcatcctattaagtaggagtcagttgcccatcctttcactgacacctgtgtttctctttcaatgttaagtgatgtgttatgtgtatatgtgcatactgaggaatcctaccttaaaacaaaactgctacatataaaaagcatattttcctttttcttctatattgattgtttttaacagtatgaaactaaactttttaaattcttgcattttgtatctcaaagtctggtggtcttgagtcatgttagggggcactgatattagctacttatttttcttcaaaatataattcaggatctcatgtatttcagcagaggaccacaacatgttgacatatatttctgacaacaggacaatgctcatgacttaagtcttagattcactgtattggcaatgttactagaaatgcacatataggtttttatagcatagatggtgttatcttttaaataaattttttattactgtggtaacacatgcccatttcagaaaatttacaaaattagtaaattataaagtaagtaataggaataagtcataatctcattacccagagatagtaactattaacatttctgtctttgtttcagttacgtttatatacacatgcatgaatgacattgaaattttaatttaatttatattgaacttcagctcatttgctgaagtcatttctactttttatagacaaatatgatatagcttttttccttttgtattgatttcaataatagtttactttctttttattctcgtatatgagatatttatgccttgcctaagggaaagcagtagttaatactgtcttatttaggcaaaatataaatacttaatgttaaatacttttaacaacattttaaattcctttctttcagagatacttcacttttcttccatatgctgggaaaacttaaaataatataaataaatttcaattaaacatccaatgctttgggaaatttagtcaacggtaggggcataattttagttttactcaaactatagtacaagaagcggctgctaaagaaggtgtacaagcacaaaatgcagttttctttggagagctttattgatgatacattaaattctggaatgatatttctttaataataaaataatctgtttaatattgaatgtagcttccatgatatatttctgaaatacaggtaaatttaggacacagaatacatacctataccaaaaaaaaacctgtatcttcaaatttccacttccaaattctaatcagtgattcagaatgtagcagtgtaatgacagttatacactcctgttttttaaacattgtcaggagttttactttaattttaggggataatattcgacattttgtttgcattcttgaagtaaggaaaactaatagagactagtagagactacattagatcagtgagtcagtggatccaggtctactacattagttccaggtcagtgggtcaatgttagaggattatgtggtgatccagggatcattagaaacaaaaatggcaagtggggaggatacatggatgctgtccagtttgtggggtaaacaggcctagaatctcttatttgtaggacaagtctgagcacattgtgctagagaagcaagaattgacttctgtaagaagaaggaacaaagtgaataaaggaatataggaaagataacagagaattggagcattgatgcagtaatttgcggaaaaatggtgtctggtgaagaaggtgtagagaaaaatgtccacctatgaggacatctgggctgttgctgccttttttgggtgttgctatcatcaagctttcatcgaaatggtttgtttttctaaatggtttttcttatatattctgattttttaaaaagacaatataatgaacatttcaaactccatagcattctaattatgtttgtctgttaagtgtctttaaaaagcatagaagttgtattcagaagacatgccttagagtcccacaaacagcacttaccagacgtgcaatctagagcaatgcccttaataaattcaaatgatgcactttaaagccacttctaaaggctgaatatatgtatataatacatttaaataggagattataattgtcattaccgtatttagtaggaaatgttgagttgctgtagatagaaaaaataatagataaatttttttaatcacctatagttttatacatttttatttattagactcttatagttgcatacatttttgtatttaatttttaaacatataaaaaaacaaagcaaacaagatgacactcatgtagccaatactaatatttaagtatcaacattttgccatatttctttcaggtttctgttttataaaaaaataaaatgtaaagtaaatagatattaatataataaaatataaatagaaactcttacatggtccctgttacacgctctgacacaatggatcctaagtgctttatagcttgtaggagctgagaatatgtactctctgcagacagtctcccaaatacagatgcatgttcagcagcttctccacaactcatcaataagatgtcacttctgctttccaggaaggaaaatgggtagagagaggcaggaatatcactttcatttaggtcctgccagatagaaaaataaagccagaggaaaatagattcccagtgaacatatccatatccttttaagacttgccttgaatccactcagtattatgtttctgagatagtttccttgataaaatgtaaatctagtcataaatctagattattcattttaactattgctaatggagtggtttgctggtaaaccagctttggaggatgaggtagagaatccatgattccagcatttgccaatttctgtggtgttactatgtccactctggcaggtttcaggctatggatggcttaactgtcttacaaagttcctgaattttaacaattggctctcacaagccagtatgaaccagatctagcatgttactatatgtgcatgtgatataatgtgtattctagagtatgaatgagccagactctatcttctacctgtgggtaattagagtgtgtccaatttttcattattacaaaaagtgattcaataggtatctttatacatatgtctttagataatataactaaaaatggtattcccagaccataggctatacccagtttcaactttaccaagcattaattagctgttcaaaatgattttaccaatctatgctccaccagtagtgtatgaagtgtgctattctccaaggtgatattgtcagacttactgttaccaatatgataggtgtggtgtgatttctaattgatgcttagtcagtttttaaaaattgatttattcaattttcacaactgtcctaaggaatatgtactattattatccccattttaaaggctggataatggacatctgtgctgctagagctatcagactttgaagcttatacttttaatactgtctaattctataccttttcattatgtattctcaaataatagtcactcaaaaatatttataaattcatgactaaggcatcattttcattagttttattgtttagcagattacatatttattgatgtactgatgaaaattaaactgtcattcttgagacagatttctattcagttggtttcttcaatacatagatgttgtcacagtaccaaaatctaattcaacatcatcattctatttaatgtagacatgacattacagactagtgagtagaagaccatggtctgtttgggtaaatataataaatgcttttctgtagaaattggttgagaacccacagccatgcaacatttttcatctatggcctgaatattaggttagagagaaggcttattaagttctcatttgatggaaagctagggaagcaaatggaaagagatgccaatagcttaatcagtaagattagaatttgaaataggtttagcataatgaacaagtagtaaaatagcaaacaatataatgtggtaaacagatgaatttcaggagaaaaaatattgctaataacaattagtaagtagagtggtgatatgtacaattaaatctcatttgagtcctactaatctagaattcataaaaattctattgaaagattcaaaagttgttctcacatcatttttgtcattgtaattttggttcactatttcttgcccatgattacgttttatgcccacaattagcataatatttacaaaattaatgaattgataaatggacatcttacctctttcaactcaggaaatcttaatactgttatggttatgtgtgaatactttgctactattaaatctttggattattttttcactactgcaaattgcactgttgtgtggatattatttttgcaaaaatattttataattttttccagtgtaagtgaaatacattaattgacacaattttcttgttgtgaattgattcttcattgtacttctgggaagatgtctgttaatctcgttagactttttctgtcactcacacctaaaatcactggtttataaatattctcagtaacattcagttagttatgttgtgttctttttttgagtggacaaacatttatgtcagtattatattttaatattttcagattactcaaagactgtcctggtttcgtgtttacccctcgatcaagggaggaacttccaccaaacttccctagtgaaatccccggaatctgccattttctggatgcttaccaacaaggaacaaactcaaaaccatgcttccaaaagaaagatgtggaagatggcaatgccaattttttaggcaaagcatcaggaatagattagcaacctatatacctatttataagtctttggggtttgactcattgaagatgtgtagagcctctgaaagcactttagggattgtagatggctaacaagcagtattaaaatttcaggagccaagtcacaatctttctcctgtttaacatgacaaaatgtatgtactcacttcagtacttcagctcttcaagaaaaaaaaaaaaaaccttaaaaagctacttttgtgggagtatttctattatataaccagcacttactacctgtactcaaaattcagcaccttgtacatatatcagataattgtagtcaattgtacaaactgatggagtcacctgcaatctcatatcctggtggaatgccatggttattaaagtgtgtttgtgatagtgtcgtcaaaaaaaaggtttttgaatagaaattacattctttgacaccctcagttctttcaaactttcaactctgcattttattgcattttctcatttaactgttagtatatgtttgaatataggctgactttttttctctattgcactttcttctttttttctttttagaaaataagcaattaggggttagatgcaatatgaatataaaatagttctgtaaataccaaatattatttttagttctggaagttaaaaatactctccatagtaacgtgtgttataataataaatatttcttttgtttgacttttttaaaattctacaatggtaaaagctattttaatccatgttagcaatttaattcctattaattcattttactatcataatagcaaagtattcagaataaaagaggtttatatcttctattaaaatgcagtaatactattcaaatctaatttagctggaagcaacatgggagtaaagtaatcatccaggggacccaccataaaggacattggtaaaacatttacacacgtaaacacacgtgcaggcacacttggaacaatatggacccacttcagcagacatcttctattgccatgctgagctgtttaaagttttaagaagaaaatctaagtatggaagtagaaaataagacttgttcttttggtggatatctcatttttcttgagtatttgtgctgaacattttggtgtatgtctatgaactaagaatcaagtttttgtctcattaaatatacatatatgaagtgtttttattctacttgaaatatcttgacttaaaaaaaacgactgttagtattgatgaagcaaatgaggcagtgactacattatggaaatgtctaagtattttttccggaacttcaactttttctttttgttttacataaacatttaagcagctaggaacttttagttttagttaggtcagttgaagttctctggtgaactaaaaaatctacattttggttggggataaagatttgattttaaaaacagcttgaatttaaagcaagaaaaagatgaacgttatagttttaaaatcaatattagcagagccatagataggctgagctcttatttggggttctgagaaataactcagtttaaaacttctttaactgcctcccttagtacccaggctagcccatggtgacatcagggatattcattactgattggcctctagtattccaagggtactactatagatattacaatgatgctgtttactaagtgataaccccgtatcttacaggactgactttgactcaataaaccactcagcctattattggaaagtgccataggccttgagaaagtatagttacatcctcacaaatatatgaagttaagtcactacttacaaggaaaaaaaatgtaaatacatttttctttctggaaccgaactcttattatggggaaataatagaaataaagaaaatgtaaaagcatgaaatggaatgtagtcttgatcaaacatttcagcagacctcaatttgcttacaatctgtactcaaaaagtttataattcaatcagaattcaaaaagtattttgtgtgtttgtgatgtattagcatatacacaaaacaaatgaggggaatgtatataatcttggtgaaaagttgtatgggagttttttgtacgattcctgcaacttttctataaacgtggcattatatctaaataaaaaattaccaaaaaacata

SEQ ID NO: 127 - DNA, 304258 bp, Homo sapiens
attccaccctccacccacctccggttccgcgtgcacgcgcgagatagtccagtgggcccacagataacgaccatcagagattaaagaaggaaagtcagcgagcttgaacacaggcgtcccgtgtggaaatgtccaaggagaccgccagaagtgcgcaagccggagtcggctagagtttccttctcaccgagagggggagcccggcgttcccggccgggagcgacccggagtccccagccccgcgtcccagctgccgccagcgccagttttggattcggcggattaggaagaggagggaggggggagagagcgcgaagagggaggggaccgaagctggagggtcccgagtccagcgccgtgttggcgtagagaaactttccctctcggcctcggagacggcgccccggccgtgccggagtggagatcgccaggctcggaggaaccggcagctctccacgcccctgcccgaagcctgacccgactgcctctctcagtgaggtacggagatttatctaggctcttccctggctgcgaacccaggctccctccaggtagcgtggaatcgcttagaagctgatatcccgaggggcggtgggggtggacagctccggccaccagtgcccgggaaggagggcgcggggctgcgcgtagccgctggccagcaggttgtaaaaaattaggacagctaaatgctcagggagtcgtccagcactaaaggaggctaagacctgttgacgcctgctatggcagcgcttgagaaatgactgggggagtccagcgaggtcggggacgcagcggtctccgggctccagaaacctccttagccttttgtggtaactttggtccggcggcggggggccggtgagcaggaactggagggaggcggtggggaaaccgtggatccgtccggctgagggtgcgtggatcagactgggctgagcaggcaagtcatcgtcgggtcacagcgaggcgacccaggagcgaacttccagggcagcctcccttttgttggcgctgggagagaatgtgggcatgggggtggggaggcgcgaagctccgaggccgggccgcggatactttaaagctcagagctgggagggcccaaaggaaggggcggcgtccacatggttacccttctgctgcgcgggtcaagtagcttcttctggagggcgcaaggcgcggcgggggtgatgagcccttgggttctcgctccgactgctaaattcgcttggccgggtccaccttctcgtggcctcactcgccacacggatcagaatccggagcaggcagttctctctattctgaggctcctgcggctgccgcgctgacttccctgtgtgcgggagggaactctgggcaggctggttttcttggaatgtgtttacgatgttgaatgggacttgaacaggaagctggacgctgcagctggaactagcgtgccaaggtagagtaaggaagacttagctggtgttgggcttggcgggtccacttggtacgctgggcaaactccaagtaagtgagggctggcagtcaaggtacccctccctaggtcctagtagtgtttcccaactgagctcgccttactcatttgcaatcagacattttacatgcactatttcaatctgcaagtttgacaaagtgtaatgcagtcaattaggaaggatttaataaatttattttgtgcctgcttttaaaatacgttacaccaacatttgagaataaaaagttacggagaatgttcaagtcatgactgatttctaggactagcaggagacaatactgatgattttgtgtctgtattacaaaatgggtgattaggtgctaaagtaagggagattattagacagagtgaatgtgaggaagtggaaaactttcagaggaattggaaattcttcaaatttgcaaattgctccctttctctgccagtctttcccttttccccccatatgaacaagtagccttggctggaaaacccacaaattgggagagtgcagtcgctggtgactacaggctttgctggaaacagcagacaggctaaggtactgccccactgcataattaaaggtctccttgagctgtccaggagtgttttccaagtttttacgactgacaaggaaaaaaagagaggaacctggccggcagccaaactagactgagctcagtagccaggcatgaaagagactgggcaagttgcaggggctaattggaaaggggctgtcggttgcacttggggtttaaacaagaggtttcttttgcaatgagaatttttaggtggctaagatcagtcttcttggcaaaaaaataaactaagcatagagtgcagttggatatgaccgaggaaattacaaaaagggctccaggagcaaagtctgaactttccttatcagtgttgcagtggaatagctgggggcctgatgctgtttgtgctgatcatactttgcaaatgcccacactttgttgctgtttgtctccttggacgaggtttgctgcaacttcaattccttgacttcggccttactttgttttcatagcagcaagaattgaagacttaagggtttgagcagatggttttctacctaaattgaataattcaattacgtattctcagctagcatggatttgggtcatggaattaaagtagaaacgtatccggcatgacttctttgtgcttatcaaaagtgatcctgataaacagatcttgctctttcatgtaaagaagtaaaaggtgagatgatctcagtatttcacacatttgccctttactgcttcctaattccaaaccagctaggaactcaaagccttaactgcaattcagactcttctttgtgtattaaagttgtgtatgtttcatctctcttttttttttcttcagagaggtgggttgtaggtttactattgtgggcttaggggttaaatggttaaaacaaacaaacaaacaaacaaactaatgtggtttatatttcctctgtatttaagagtttgagattgtgaatattagcctgctttctgagactcactttgtgaatcaccctcagccaaatgttttccctgactatgatttcagtttttccacttgcaaagtaaagaaactttcctttacataattacaagattattgtgagaattaaagagatgaaataatgttaataggcttttcgacataaaggtcataggatttctgactcagctgactcagttgagtttatggggataaaataggaatacttctatgttgaatacccatgtaataatgacatatctggatctaatttataaaaattaccacttttacattttaatcatagctttaatttaatcatacattttaatttttgaggatataagggagattttgttatggttaaggctgagtcattttctcaaacagaaaagaacaattagcacattcatttatttttatttcagtttatatttatacacaagaccagttatttttaaagtccagcttaattttacctttatgagaagttaccaagtatattcacagaacttggctctcttctcagaaataatgcttgagaagctgaaatatatttatgacatacaaacagactttcttttcttaatggccacaacaatttccttaagaatttggaggatagattttggagccattcattaataaatccagccaatgtttgttgcatgcatatcatgcatcatcgggcctgtattccaatcagcaccgaacttctcagctctgtgatttctgtgcatgttattttacttcttaaacatttttccaacatatcatttattgcctatgtttctgtctataatttatgagcctgttcattgttgattcattatgatcattgtgaaatatttactttttagtgtgacatgtcaattagtaaaatatactacatatttttatggttcattgtactgtgctacagtcatggatgtttaacttaactctttttcgggtgaacagatcaacttattagagaaaacagaataagtatagataaattgtttaaaggataaagtcttttgctaaaatacctagtcatagcttttatttttagactttatattataattaatagtgaatctgtaaaaagcacgtgtatatgggatatagtagttgggttgaaacttacactatgggtatccttgaacaagtggctgtttgaggatatattagggtaattttaatataaaatgtcaaattttacctttcattttaaattagaaatccttaaaattcttatttccattgatgaatggtaggtgattttaatttaaattttacttagcagagtgatgtatttgtgattcaattcgcgatattgcaatttgttttctaaaacctctaaagaataaaaaaagttattttatttcagtataataatgaattcaaagatagttacagaagctaactgcataactgccatgagccctggtccctaaacgtattagaggctggtggatctaatattgtttgccttaatgcatttagagatcaggaaacttaagctttttcccataagagcataaaatatactcagattggaagaggaaaaaatggtataactttgaatggagaaatcgcttcactttcaaatactggggatatgaaattgaaatcaggcctttatttttaaagagaatggctaaaagtcattgttccagagtaagacttagaaaacaatgcttatactgttttcaggcccttgttatttgcgagttttttgtttgttttatgcctaagaaatgttttcagccactctaatgatgcttaccatgcatgattgtcatcagaggacagttaattgactcaaatattgtgtgggatagtaagtgtcaattttctgtttacattgaaatggtatagttatggcgaatttgaaattagttttgtctttcagtgtagtatacttaaaaatagttttgaaaaggctgccctaatttgcacacataatatgaataagtaagttaacttatatagaaattaagattttcagtatattttgtgctaaattgcaaagattaatatggctttttaaaggaagttttgaatagccttgtatgtattttctaggatgcaactaagagagtgcatctagatatcaatacctgcctttatttcatgtttgttttttgctattaacattatataaatgtacctatacatcagctgtatcatatacctcctgatgaagaagttcagaatagaccttagaaacttccatattttgggggactactttctctctgtctctctgtctctgtcgttctctctctctttgtctgtctctctctctgtctccatttctttctccctttctgtgtgtgcatacttatgatacatatatattctttgatgtttctctatttgtgctatagtttttctgtagggaaaaatagcttcagttaattgatatttttgagcccaattttaacaactaattaaaaatgtttcccagataagtattgctagaaatcctagaaatccttttttttttcttttttccaaattctaaaagtgtttttagacttctatttatacctccgaaagaagagaaaaatagttggcaagatcttctacctacattctttgttgtaggctctaatgatggcatactcatggaagccctttctactcttcttaagtagaacacaagcacatgtacagttaactactgtaagaaggtaaattcactacttagaagttagatactactgataagtttatcaggtattgtgaagtgagaattttatacaaatgtagtgttttcctggtatggtacagctttttcttaatattaggtgttacagttgatccatttcttgaaacttcatccaccagtcctccaggaacatcaaggatcttaaactttgccagagctacaaaggcaaagtttaagatccttgaagttcctgggggaaccatggatggctatccttatttctataagagaggagactgaatactgtgggctcagtcttcagtctaccctcttatagaaataaagacaatcatttcagagcatacataatctactgactgaatcattaatgatttgcctgtttatagctgtataatatttcatgaggtgataactattgttctcatttggtttgtatttaaattagataatatcaattttaaatataattttagccaaaaaaaatcaaacagaacatttgtagtatggtagcaaacgtgcaaatttgggataaaaaattgaaataagagaataaatgtgattttagcttctcaatttttttcatagccatttataaccatcaagagataccatgttttaagtaaaattttaatagcaaataggttcatttacccagatttcaacctaggtgaattaaaacatagggttataagtactaatgagagttttaagaaacagtattttgtaaagtatctttgaaggtcaaactacatgttatgctctgtaatttattttatttttgtctgctttgaggaactgtgtagtaataaaggactttggttgatgatcaaactctccttttacttccttgatgatgtgtgttattatagtcataaagatgtccaataacataaacactgaactttactagtagtgcaaataaatacagagaaagtttggctgattagaaagaacaattgcataactgaattaatttcaaagcaatttatctctatgctgaatatgttaattaaatataattagagggtgtttatggattgtagtatctcagaatatagtttgagagaatttttaaggagtcacatttgagtaaacaaattttatttgaaattacgtaaatgcaatatgaaatggcaaaagtctattggtattttagatttataaaatagcattgttttagagtaacaatggctattgctttaaatttttatgaattattttttctgttttaatgcatcaccatgactggatatgtaggagaaaaacctttaagcttcttagcagtaaatcagtaagaggtctcatattgctaatgtctttagtcattttaaaggaagaactactaaatttgtaaaatctgagttatcataggtttagctgattacattaagcagactaggaaattcatgatcaatttggaaaaataaaattttctagagtagtacagatgaggttttagagaacaacattttagacttgatgttgttggaagtaaatgctcggtgctgccaagtgaatatagcactcaggcaaaagtttgctcagcaaggcaatttacttctataaaagggtgcctctcacggatggagcaatggcaagagcacaccagacaagggaggagaaggggatcttactattaatgcagctagtccctactgcttgtttttcccctattgggtagggttggaccgcacagtctaagataattccaactggctattttaaagacagcaggggtatgagctggagtggcggggtgagaagctttggtgggaaggacggttacagagcaggtgaccaaggatgactaaggacagagcaggtgactaaggagggagcaggtgactaaggatgactaaggacagagcaggtgactaaggagggagcaggtgactaaggatgactaaggacagagcaggtgatagaggctaggagggggttgtttactaaagctagggacaaggagatgtaaagaacgaggaagttaaactttcaaatggaaaacaaagaacagggaagctcaatatactaacatattggttctttgaagaggaatttactgtatcctacaatgtaatgaatctttctttgggactttcttattcaatgagattttgtctttattcagtgattttccattcacttaatatacatttgaagtctttccccccttctcattctgggaaatataactgtgtttaaactgtgcatctgcaaataaagagattctgatatgatacagttgaatttaataaatacttatcaaataacacttgttctttttgtagttgtgtgattagtaggtgacagagacctcctcttattaacttaaatagaagttggtatttctatataattctgaggtacagtgcagaggatgttgaggaaggaggagtggggaaagcgggtattcaccagtgtgaagggaagcagtgtatggaaagaatgtgtgcaggtgattcttagaccaagtcacagaggatgaggatgagttgggcaggcattgaaaagggacagtgtcagtcagagcaggtgggataggcaagaaggcatgaagccatgaatgtggtttaggagaacaacttgtggattttacagttatagagatgttcctcctttatgtttccatgttcatgaactaaccattagtaattacataaaggagttttagctggattaatagttttagctgaataattttagctggattatcttgcaaaacaaccatcttgtttttctttctttttttccatttctccagacctgatcagcatgtaattggaatcacaaggagtaggttgtgctctcgatttcatatttatatttaatttcagaacatgcaaattaaaaaaatttttaatcacagcattaactatattgggaggagttatgatttggctctgcatcttgtcttatatttgtttatttttcatatataaagaacagatgtgttaaatagttatctacttggtagtaagtaactgtgccagtattaacaatttttatgaataatattgaaaaaataatttttttctgaacatatggaaacttgataatttttctatgcatcattgacttatttaagattatatatttggttatatggtgtggattacttactgatcattgttgataaaaaatttaaatgtgtgctaagaagtttggaaaacgaatttagaatatgtacaagtacaacaaattactatcttatgaaggggacctataattaaaacatatataacataatttagttcgctatattcccttctttttgcttggcttgaccattctgtgagatacatctattttaaaattagtttattattgatgtttgatttatttgaaactaatgattcaactttatttttgaagtatgtgacaagagcagtctctttaaacttgttaatttgaaatagttaatatatagagcttcacatttataaatcagtttagtaggtctggaccaccttgaagttccagggatgggtctaaggtaatagttttgtacttgaaaattgacaatactgtcaagatcacaataagaaataactgtctttcagtctctttctggcttttggcttcactttgtgttttctgtaatggtaagcatcaagcaccactgacacttatttgcttccttctcctgttgaatgtccaggttcctgtttatttatttatttattttagagacagggtctcactctgtcacccaacccggagtgcactggtgcaatcatagctcactgcagcctcaaactcctggactcaagtaatcctcccacttcagcctcccaagtagctgaaactataggtgcatgccaccatgcatggctaatttttaaatttttacaattccttctagagacaggttctcactgtgttgcccaggcttgtctagaactcctgggcttaaacaattctctggctttgacctgccaatgtgctggtattacaggtgtgagcactgtacttggctccaagttcccttttaatgacaatgacattgggttaaaccaggtgtgattttgtacctgaagttaactcttctttccgtttcttgcatttccatttgtaagaagcatgttttcacttttgagagctatatcaccttccttgtactgtggcataaattattgatagtccactaaaatctattccttattcttcttttccctggtattattcaaatgtccactctttcccacataactcaggggaagtcaatcctactcctaattcaagggaattttagattaggttcagctaaaaatcttggtgtttctatgccccttggcagtgattgttccttgtcccagttttagtcatatgtcacatgtcaggtgaaatgagaggactaaggggaatgggtagaaaagatttagttccacttagcaagggaacattggatgagaaagcacatgttggcttttgatatttgtcctatctggaatacatgcttcttcaaattgctacagggatcatcttttgtcacgaggagattcagcttgagggcaaaacaaatgccttaaaatggcagaaaaaatataaaaccttgggtacttgatggaatcattgggttcttgactccctactatatttctggatttactgctgtgtgagataatgaatttctttctttttcaaaccaacttgaataaaatatttggctacttaaaatagtatcctaattatagccattattaaatgatatcttaattttgtaaataaaagttttagaagtagtaatttagattattgaagaaactttacagactacttgggttttgtaaattttagatatggttagtgctattagtctataaaaacttattattcaaatcaccatgcattaagtttttaatacagtagataagtcaatcatcttattaactagatttattttaaaatgaataaattatgcaggaggtagaggctagcaaaactaggaataatctaacaagctcagacaatagagaactaaatttaaaattttttgaaatataaattcataatctaatcagttcacaaaattataccactatttattggctgtgtggtatctttagtgtattgaaaacattaaatatacataaagaaatattgaagcaatttcagtgcctggtctgagtaatttaaaacttacagtgtgatgttaagactaattagtaactatttaaatatagaagataaagctgataaaagtaaaattttaaaaaatggtaaactatagttccactcacagaggtataaaaaaatacagacatacagtaaacttttaagtaagagctagtgacaaagattttctccttgaccaaatcctggtcaggctcttgtgcgtcctcttctcaaccaggccttgacttttgggcttctgtgttctgatctgcattgccaaatttagcaagaatcctgctaagtgtctttggccatcctcaatatttgaccactctatatctaatgagggtcctcaccttccaccatttcccagatgatatctcatcaccctaaccttcattcagcaagaatcctgactagtaatttttcttccactgtcttacatcctgctatttggctacaaattcctactttttcttgtagtatttgaagttgagcctaatttttcttactcactgcaaaaaccccattgcaatggtcccaacgcctgttatgatggtcctgaataaagtttgccttcctgttctttaataatgtcatgaatcatttttttcaacactaattttataaaactctagttcactggaaccattagcaatttaatctttttctgccaccaagttcttgacctgacccagcctttacaatgacttagcagtatgcatattggtttttgtaatgtgctctaatcaaagtagggagatatatatctctttgtctttttgccctgaaggtggtaggaataacccaaatctgagaattgacaagagcagggatgaaatatattttggagtattattgctcgctttagctgaaatagttaaccaagtagtttaagcaggaggtggaggcaagcagaactaggactaacctaacctgctgaaagaataggcaaagtgtcataatgggcaggtttgctgggaatgagggatgtgagaaataaaaagccagaggttgtgtgggcagtgcacttgaagagagttggtgaaactgtaggtaggaatgttacagatgctgaaagtctgcagtaaagctgtgtggcaaccaggtcattggtcaagactgagaaaggctaatgtattagaactggtatcagtatgggtgttaaaagcatggagattgggttggagggaaacatagccaataactggaatacctaaggaaagtgaaagagacattagagaagcagttattgatggcgacatttgaagtaacaagacctcctacattactgtgattgacttgtgcatattagtttttttgcataagaatgcaataaacatgcttgagatgcttgctttatgagatcatgaccttcattcatggcaactaaggaagtcaccacactggggaagctaggcaagggagaccagagaatacaaagtgctgcaattctcagaggattactgttcttttggaaatgattgtttagagattgtcctggggcccccctctgcccttacagaataggagtaccctctggcgacctttgcttgttttaaaagggagccacattcttgtgggtttttgaatgagaataaatgctgcttggtatggaaattaccataaaggaactctgcttatggaagagtttggaaattatagtagaaaatataacttggctcacagcagatataaaatgagggaaaggatgtatatctagataattcaatttccaactcccacttgtgctgaaataatcagataaagtaaaaatagcacccttccttaatttgtctctttctgtctattaagatcttcataagattcataagattcatattaacatcttcataagatttctctaatctattttcttatacctatgagttgacaccaaaatggatttttcgaaccagagagtaaagatacaaagaatagtatttagagtgctatgtcctaagcatcatgttaaatgttttttacaatttacaaatggtaaagaaacttgtctaagtatccacagccagcaaacagtggaaccagggcaattggtaggatgggaagtaatgcgtctcaaccaccatactagctgaaaaagtgtgctgttgaatgccaactggacagttaggccacctttgtagctgtctttacaagtgagaatgtaacacctttgaattacctgacttcctagattcctggcagatgctcgattccttcttttttgtccctctgatggcacaatgagctacttatttcctgctcttaggcatagctacttgtacctcctgtgtgataagacatttgttcattttatcctcttcagtcagataaagcataaaaattaatgcattgtttaaggaaaaactctcaaactatgtttttcctctgctctcatacaacaacaaccagcacagatgacttctgtgaccaaatatatgggtttttttccccatcaataagcagtggacagcaaatgagtgtcttctaattcaattctgacattatctctctggagataatgtcagatctcacaggttgagggctcattccccaagactgcccctcatgcccctccaacacttgttggaagtccgggcctctgtaacttctgacccactgacttcaagctggagttcccacgatcccctctttggatgtgattaattcgctgaagcagcttacagaactcaaggaaacacttacttatgtttaccagtttattataaaggataatagaaaggatgcagatgaagagatgcatagggcgacgtatagggacttacatgccttccctgggtgggccaccctccaagaacctctacatgttcagctatccagaaggatgctctctgaaccctttttgggttttgaggaaggcttcattatataggcatgattgacaaccaacagtgtagaaatgtgattggacaaagcacatgatctaaacccagaaaggcctgtctgttcagacttttcttggcccctctgtgtagcattccttcctttagggtatgggggaggactctctgtaatgagtgttttgattcacaatcagattagagtcctgcttgggcaggtaaaggaaggacaggaggtcagagaggtttcctgaggcctaaagtgctccagcattataacaaggactatgaaagttgggagccaggaaatgtggatgaaaaacaatatataattatcgtgataccacatccattgacaatgttttgtctgcatattcctttgacttttgcctgatttgatttgtcaggatagttaaaatgttaggtgagatagtctaatttcttctttttaaaaagattttcaaaatttattttcaagacagtcttgttctgtcgcccaggctggagtggagtggcgcaatcttggctcactgctgcctctgcctcccaggttcatgtgagtctcctgcttccgtctcctgagtaactgggattgcaggcatgtgccactgcgcctggctaatttttgtatttttagtagagacggggtttcaccatgttggccaggctggtctcgaattcctgacctcaagtgatccgccctcctcagcctcccaaagtgctgggattataggtgtgagccaccgtgcctggcctgatttcttcttaatcccatttttcctccttggttttgtcaaatgataagatttgggtaaatataacctaagatataaaattactaatatcaatagtttctaattgttcaacatgtacttttcacttaagtatttgataacatttttcttcactgagaagatggactagataacctcagagaacatttcagcccttagggtagtctaaaatttaactttaaatagtttattttcctttttttaaaaacaaacctaaaaccaatttcttaatcaaaataccatattcaaagttgtcctaattttggcagttaatttcatcattttgtctttctttggtaagttaaactgttagacatttgatctctgtggtatttgttgctggggtattataaaaacgttctcttggcaggggatttgacattctagttgtgagggaagatttcttggtagaaagcaatgagagtgtgcagagagtggttcaaatgtgtaagcaggaggagagaatgtatggtttagctacagaataggagactgaaaatagagctagagaatagggtagaaagagaagagggactaaaattgctggagatgaagccagtgaggcagggagtcatctggtcagactttacaatccaaagtttgtacttcattctaagagcaattcaaaaccatttaacaaaggttataatggagttggtgacaaaatgtcatcatctacgttttagaaagagctgagttgatgtctgccaatatgtctaggcaagagggagtggaagcctagtttagagggatgaccatgggaaatgacttcattccaagatattaaagaagaaataatgttttgtactttttgtgtatttgatgactatcaataattgtgggaggtaaacagtaggatgtaggcaggagaatggcgtaaatctggattctaagttttctggttttggtaacttgggtgtttgtaccatttatcaacagaataaatacaatagaagcagaattattgaaggaaaataatgattttgtaggtggtcaataaatgatagctagtattattatgtcatgaaactatgattcttggatttttatgtttaaattttacagtataattatatgctgttttcattttgattaacaaatatgatattttatgaaaataaatttatacacaatgataaatacaggtagaacaacttcaacgtatcatgtaatttgtgacttacaaaagataaaaattaggatacaaaattaatttctgttttgacatatctgcattaaaaagttatatgttttcagaagaaaatacataccagtttaaaaatattgtgtaatttgaagtgagatacatctcctttttcgagatttttttttttacaaataaaatatggtagtaggaagtttacaatgtaaaatattcatatgaaacaaaataagaaagcctcaatcctaaaattatgtatgagaaagctactaagttttttagttcacatgggtcaatagttttcaattatataattaatttatgctgttgaaacacatttaagaatactggagtttagtataaaggaaaaaaggctagtttccctggctgttttgatttgcattcttctttattgtttaattataattgagatcatgtgccacacactggtttgtagactgagttcttttcacataatatgctgtggtgtatagccattgatttaggtgtatttactgatatgggagcaggaagaacttcagaaggagaatcctgtggatctaatttcatgatttcatatttgtagtactattaaagataaataggaaatggtgtggattgataacatctaaacagaaaattagtaataagagaaacattaatcatttggcagtggtttttgttggaatcactacgccagcaatttttcaccagtagacaaggatgagtacattataaactgggtgtcattgtgccagtcctgcccctgggctttatctctcactcagctcttgatcatgattactaaggcctacagtctgaatcttttaggtcatttttttttttcccccggtggcctgcattagcatccacatgtgttcagactcaactaatttgattatgaggagagactgtctgtgactgtcttcctgacatcagcacagtcattaaagtaacttaacatcatggacagaatctgttttttaggtttggtattttaaatgcatcatttccatcaagggctaatggcaagctgcattctgttttgtaaatgtacatgggaaagtaattatcacagaaaaatgttttagaaaataattttcctcagtattaaaatgaaaacattacaaaaaaagcttttgaccatcttttccccaacatttaaaaaaggttaaaatttgaaaaacaaatatatgagtgtgtgtttgtgtgagagaacaaacccacagaacataaatgcactagagctttgttttatgtcccccatttacatcttatgtactgaacttctccaagttctgaacttctgcaagttcagtaaaaaagatgaagtgtatagtccgtaagatgttatagaatgccaagatgagttattaaagacttactgaggtgcagatagacctggctccttaccagacattcccatggtgtgtagtcttgctcctggctccatcacttgctagtaaagggtcttgagaactcttatttagctctgagattattcagagattatttggcttttctagaagtttttcttgaatgtaaaatgaagataatggcccgaaccttgtatgcatcactgagaggtataaaagagagtatctgccgtggtacttgtacattttcatggagctttttcttgtgtgttccctcccttagcccccagattattagagttcgtgtgtctctgtttagcttggggagcaggcagcatcagattttcttgttcttcatctgtcagatcaccatgaagctcctaaacatccatagttaacatttatattgttactttgttgtttttgaaattgttccttttcacagtttgaatccaatggcatttttcttttcgatcctgtcttttgggagatgtaacatcacgaatgatctctgtcttaagaaggaattggctaggcttggtggctcacacctgtaatcccagcactttgggaggttgaggtgggcaggttgcttgagcccagcagttcaagaccagcctgggcaacatggtgaaaccccatttctacaaaaaatacgaaaaatagcctggcatggggatgtgcacctgtggtcccagctactcaggaggctgaggtgggaggactgcttgagcctgggaggttgaggctgcagtgagccgagatcacaccactgcacttcagtctgggcaatagagcgagaccctctctcaaaataaataaataaacaagaagaaattaaggtatattatcttgagattccaactcaatataagaaagaagcttctgataatggatcaagattgattatgcaatagtgatgctctgttactgaacctttttggagaaaggctgagtaactacggatcagggctattgttgaagagtatcccatagcttgtctgtagcttaagacattgagagaaaaaaaattttaagtccaactgtgataattgaaatttaaattgagtgatcaatcttgtggaataatatttgtaaatacgggagagccaataattgtgtgctaagtggatgaaggctgctggggttcctgcttttactatgcagactttcattcattcaacatactttttaaagcttattttttgctatgtgccaactactgtgctagattcctccaaggtattcttaatgtcagagaagagtggacttataagcttaatctgccttctgcaagtgtacttcctttgaagtcttaaattcattagaatctggccttctgcttcataaagtttgttttaaagtaaaccttctatatttcagttacaatgaggcaatttcaatcctctaggaatatgggttattaatttctgtgacttcatttactccccaactctgctacatttcctaagtgtttatgtgcctctgttagagttctgtagctgtggactctgaggaaccattcaaggtttttaaacaaaataaaaggaagggaaaaagaggaaaggaacatgatacactttgcacttataaaacctcacagctttgagcaagacagaatgaagaggtatgagaataaagtaatataagtaaattggaaaatgttaaaatagtctcgattagagaagatgaaggcctgaatttaagaaatatcaaggagattgaagaagaatgaatcagggtgatgtttaatttatagaaattgttggttgattggatgtgagcatatcaagaaaaagaaatagaatcatgtgtaaattgcaagcttgcttggttgactggattgcagtaaaattcaccaagacaaggaaatatgagacaaagaatgtgattggaagaaaaaagtaagaattcttctttgtatttttgagtttgaggtgttttggggacattcagggagaggtgctctatagtgagttggatataccatttggaagtagggggaaatcctgagatggagatggatttgagagtcctcagcctggagatgactgtcaatggcatgaagtcatacccctgagagcactgatatttgaggagaatcagaaaatgagaagccagtaacagacacagagaagaaaatctgaacccataatttcaataccagagggacttcttaaacctcataggaggaagctaatagagatctaaactagatcattttagaagagatagaaaagaaaggactaacttgaaaaatattttaataggacttaactgtgttaaagatgaaattgtatctaatatttgtcagatatttctagaaatggtcagcttagctggccagggctttgtgttcatttttgggttgcagctttccgtgtccacacagttccttacctgaaattgaatagagatttcagaagcctggcaaaatgagtttcaatccttggtcaaaggataaagaattatgggcctccaactcaaggaattatgcccaattccccaaataatatttctgcagttggttattggtttccacaaatacttttttttttttgagtcggagtctcgctctgttgcacaggctgcagtgcagtgacatgatcttggctcactgcaagctccacatcccgggttcaagcgattctcctgcctcagcctcccgagtagctgggactacaggcatgcgccaccgtgcccagctaatttttgtatttttagtagagacggggtttcaccatgttggtcaggatggtctgtatgtcttgaccttgtgatcctgcctgccttggcctcccaaagtgctgggattataggcgtgagccaccatgcattgtggagttaacttttcctttttgtgacttcatcttgagctttgctgattctgacaccattttgaatttgaccagtcatttaaaagaagtagagatacctagaaataaatatgagtagatgtatccaattttaacaaaattgattttctcagttactgaaatttactatgaagttatattaatatttagaaagcattttatgataagcattataaaaatgtttatttatatttatatatttataaatctaatatttatatgtatataataaaatataaatatttaaatacaataaatttaatatttgtatgcatatacttatacgtataagtatatacatatgtactataatacttagaagcattatatattataaatatatacacattacatatttattatatattatattaatacacatataccttgaatacaattactactaaacatttcttaactcaaactggctttttaacaaaataattctgacggaaaaataaagaatttagagaaatacagcattaatatagacttctaactacacttgtagtgaggtctttatagacagctccttcaatataattcaaaaacaccatacctagatttgctattgtctttctgttatgtcatatctctttatgtttttttctttaaaatacctaagtactttagaaaatatctaagactattttttttaatttctcctaaaaaaaaacccagatatatgttcagaatgtgcaggtttgttacacagatatatgttttccatggtggtttgctgcacctattgacctatcctctaagttccctcccctcatcccccatccaccaacagaacctggtgtgtgttgttcccttctctgtgtccattgttcaactcccacttataaatgagaacatgtggtatttggttttctgtttctgtgttagtttgctgaggatgatggcttccagcttcatccatgtccctgcaaaggacatgatctcattcatttttatggcagcatagtattccatggtgtatatgtaccacgttttctttatccagtctatcattgatgggcatttggttggttccatgtctttgctgttgtaaatagtgctgcaataaacatatgtgtgcatgtgtctttataatagaatgatttataatcctttgagtaaatacccggtaatgggattgctgggtcaaatgctatttctagttctagatccttgaggaatcgccatactgtcttccacaatggttgaactaatttacattccccccaacactgtaaaagcgttcctaattctccacagccttgccagcatctattgtttcctgactttttaataatcgccattttattggcatgtgcatttctctgatggtcggtgatgttgagctttttttcacatgcttgttggccgcatgaatgtcttcttttgagaagtgtctgttcatatcctttgcccactttttgatggggttgtttgtttttttcctgtaaatttgtttaagttccttgtaaactctggatattagacctttgtcagataggtggatggcaaaaattttctcccattctgtaggttgcctgttcacgctgatgatagtttcttttgctgtgcagaagctctttagtttaattagatcccatttgtcaattttggcttttgttgcaattgcttttgacgtttttgttatgaagtctttgtccatgcctgcgtcctgaatggtatttcccaggttttctcctagggtttttatggttttgggttttacatttaagtcttgaatccatcttgagttaatttttgcatcaggtgtaaggaaggggtccagtttcaattttctgcatatggctagccagttgcaccatttactgaataggagatcccttacccattggttgtttttgtcaggtttgttgaagatcagatggttgtagatttgtggggttatttctgaagtctctgttctgctccattggtctatatgtctgttttgatactagtaccatgctgttttggttactgtagccttgtaggatagtttgaagtcaggtagcatgatgccttcagctgtgctccttttgcttaggattgtcttggctatatggggtgttctttgattgaccatgaaatttaaagtagttttttctaattctgtgaagaatgtcaatggtagtttgatgggaatgtcattgagtctatgaattactttgggcagtatggccattttcacaatattgatttttcctatccatgaggatggaatgttttgccttttgtttgcatcctcttttatttctcttttatttattttattgagaattggtattttattttattgagaattggtattttattgagaattgagtattttatttattttattgagaattggtatatagttctccttgaagaggtccttcacataccttgttagatgtattcctagggaaaatgcctaactaaggcttttaaatttttttcttcttttaaagtttcataaaaaggaaaattaaaaaaaaaacaaaatacatataaaataaagtaacataataagactccattcttggatctagtgctggcatgaagtcttaacactgtctgtagagtcgtttttagtcatttttagttgtggattcttttgaattttctatattttctatatagttcttggtaccaactggatagccttcaagttacttaatctgtctatataaaatggaggtcactttggtgagaaaaatctcttcacaaaagtttcctaacaaaatactagtagtacagtaggggaattgtctctgtccttaagaatcattttttattacttgaaatgtcaaagtcaaactttctcctgtgcaaattttttcttttaattgttatcctgtaaagtgaaaaatagaacccatgtcctagtgtcctagatctttatcctccccctctccatttttcatgatttagtttcttgcatactcaacaacctctctcctcccacttgcccaaggtcacacagctaggatgtaggcctcagccaaatttgtagtcagccagtatgtctccataacttgtgcttttaccgactacaattttttaataaaactaactttgtaaaacctcctttggctccacaggctaagtagattatactgtgctctgttgccagccccactacactttctttatgtaccttttaaatacattacagtagtctccccttaacaatggttttgttttctgcagttccagttacctccggtcaattgtggttggaaaatattaaatggaaaattccagaaataaacgattcttgttttaaattgcacactgttctgagtagcgtgataaaaccccacactatcccctacttttgaatcatccctttgtctagccatccgtgctgtctgtgctccccacccattagtcacttagtagccatcccgttatcagatctgctgtcttggtatagcagtgcttgtgatcaggtaacccttattttacttaataatggcaccaaagcacagagtagtgatgctgagaattttaatatgccaagaataagccttgaaatgcttactttaagtgaaaagctgaatgttttcaacttaataaggaaagaaaaaaaatcatatgctgagattgctgagatccatggtgaaaactaatcttcaatccatgaaattgtaacgaaggaaaagaaactcaggctagttttgccatctcacttcaaactgtaaaagttatggctgcagtgcatgataacttttattacagtatgttgttgtaattgttcttttatattagttattgttaatctcttactgtgcctaatttataaattaagctttatcatatgtatctataggagaaaacatagtaaatataagatttggtgttatccttggtttcaggcatccactgggggtcttcagatgtatcccctgcagatgagggaggactgctgtatagtgatatttttctgtctgtattgtggcctatcagagtctgtttcccaatgtctttgtttcagacctttgaattttttgtatttaatcattgtctttatagcacttagcatactacttgatgttaagaaagtacaaaataaaggtttcttggattaatgaatacagtaggcccccttcatcctcaggagacacgttccaagatcctcagtggatgcctgaaaccacagatagtatgtaaccctgtatatacctgtactatgttttttcctgtacataccaatctatgataaggtttaatttataaattaggcacagtaaaggattaacaataataactaaaagtaaaatagaacaattatggtaatgtacggtaataaaagttatatgaatgctccctctctcggtctctcaaaatatcttaatattttcagactgtgactgattgagggtaattgagccacagaaagcaaaactgcagattaagggaggctattgttaagtgaatgaatgtaagaaacaccaagaagaagcaggatatgagtaaattgctgctatgaaagataaaaagaaatagttgtaatgatggcgattaccatttagggtaaaacgtggaagaaaaagccatgatatttgatctacagttagaatgaaattttatttattgctctgaatagaatgtatagctctctttttgcttgtatgcctgatacaacagagaaaggtagaaagactcccttttacaactcattttctgtttttgtaaaggcagataaaactgacaagtttcatcctgtgacaagaaacttctaatatatttgaagaattacagtctctttggctagcaactaccctctttatggcctttcacacttttttgactttttgtctactaggttgtttgctttctggtagattttttcattacagttgcacactcacttctgtacattttctccatttgagtgtcccaggtcctgcattatgtcacttctctactcaaaaccttccactggcttccatttcatataaaggaagagtaattacttgggaagtcccacatggtatggcctcttgatgcctttgtggcctcattgctcactgttcacacagcgccctgactgctcctccccagctgtcccttatgcttcacttttcaactcctgctttttcctcagaagtcatcttcctgggaagcctacccttacctccatatttaaaatcacaactccttggtatttcccattaatcctattttaatattttcagtagtacttatcacctaatatactatatcatgtaataatctggtattcttaatatttcttatctacaagagtagaatccccataaaagtagagattgctgtgcatttgtttatattcctaggaacccaaaacctataacagtgccaggcatgataggctttcaaatatttgatgagtgaatgaagaaacaataaattcaagatctcatttcctttaaagaaaacatgcctccttgaaaatgcttatattaaaatatgccttgggaagaactgtgagaaagatgcaaatgttagataatgaattgggagagggccacacctgcacttaacccttcctctgttacctgagtgccactacctagcaaaatcggtttttatctcatagacattagcagaaaacaagccaaactctcccccatgatgtatgtagccctgcacaatctggcctcagccacttgactacctcatttcatcccataggaaggaattacgtaatttttcatggctcgtttggtttcctaagattatatgtatgcacagatgtaggtgaggactttaatcctaagaacatggttcttttcagattgaattgcaattttctcctgaatgaaataggaaacatatttttacaagatatactggaagtaaagtgatagtcgacacaatctagtcaactgggattttgattgatgatctggggagtctaagaagcagtgacaaccagagagaaatatatttagtataatttaataataacctgatttgcatgtttttgtctgttggagtaattacatagatttatctcttatatctttacattgttttatttttccagattatggtgcagtctgtcaaatgtttatgtattgaaaaggccacttactgatagagtatgagaaattcagagtatacgtgtttttgttgtatttatatgtgccatgttaatggatagctttccttggaaagttggggaggacatagattttatttataatgtataataatatacttaatcatgactatataacttaaaatattataaacatgtattttaaaatatgctattaagtgaattagtgaggttttttttttatattgtggcatatgtatagtggatcgaagatgatattagatggaatgagaaaagtttttctgagagtaaaactatagttccataagtagattgattttatgatcacagctttttcttttccagtttttcattgttcatttttgataccttggcaaactaatctttagtgtcagccaaaatttcacttggctatttattgtaaattgccctaattgatgagtgaaaaaacttttgatacctgcctaatcttagttggatgaaataactgatttccttctaattaatttttgctccataaaatgatatgttaataaatgaggaaaatcagtcatgatctagaaagtgcagttattcttgttcagaattaaataaagcagaatggagaaaatgcaaagcatttttttgactgttgactgactatcgctatatatgttattttagtgaatcagagtaagtctcataaaagttgtaaaacatttagtcagagggtatataaattttttatagctagtaggaaaatttctaagtccttttaacatgcccaaatgtgctgttgttatcagttgttttattttcagacagataacaaaaatgtcaataaaattcccagagtaacaatggtgtgctgatggtattcaattgttcttttctttcaataaactccatatatggaaatgtagctcaatatgaggcagaaggtgggactcaacaacggagacagggctggaacaccggatcaaattgaggactagctaaagcaaggaaggggcagaggcagctttccataagacatgcccagcagtgcaccatattagtttatcattggcatggtgagttactataagttaactcccaagttaccactgctttccgtgggaataatccaacaacccaggagttattacccttttcctagaaatttctgcataatctgccccttaatttgcatgtaattaaaagcaggtataaatatgactgcagaactgccttttagctgctattctaggcgcgcttcctatggggtagctgtgctctgcaaggagcagtgcttctgcttctgctgtacactaccacctcaatagaggctcctaccattgtcatgcctttgatttctttcctggacagagtcaagaactgtcccaagctaagccccagtttgggggcttgcctgccctgcatcgaatacattatttaatttatgggtgatatttgttttctaaacatttttaaatctgtggaataaactctgtagaatttagctagcaaattcctttattgggaacatgattaaagctgttattgtaactgttgaacaatttctatattatacaaagcaagatatttgcattaaatgttaataagctatagcagaatttttgcatcttgcttttgggaaagcttattctttgtaaaaataaaagtttttacacatgaatgcattcttattataaaagattcaaacacaagacagagagagcaaaataggaatgtttaccttcatggcccccttacacccacgtccctcagaggtaaaaacaatagtttagtatgcattattccagtacaaaattttgaccattttcagacttgtacatcttgatgttaatacattgaaagatggaatcatagtgtatattcttttaacttgggttggaggaggtcaacatactttggaaataaagagatttgattttacaactgaaggtcaccctttattatttggacaaatctacccaactagctaccactgctagcatctcataggaatgggaaacatgactatgagcatataaaataattgtgttaagtcaggtcattcatcaacaagccagaaatgtagcttaaatagcaaccctttttcttttatggttgtttgccaagtttgcctacagtccttgtatatgtgtgtgatcattactacagcatgaccccatattgcatttctcatattagccataaatacttattacaaaactttagatttttattttgttgattcagagctctttttttgtcctattctttctttcatttgatcttttttgccctttttactttcttctatcattgagcttaatatcttggagtatgtttgatggtgataagtttagtatggggtttcccagtcttggcaatattgacattttgggaaagacaactctttgttgtcaagggagtggccctgtgcattgtagcatgttaagcaacatccctggcctctacccactagacaccagcacagtgcccctagttgtgataaggcaaaatgtctctagatgttgtcaaatgtccctgggaggcaaaagcattcctagttggtgccaaatgtccgctgggaggaagaccatcaccagctgatgccaaatgtcccctagggagcaacaccatggtggtagagaaccaaagtttattagcatctctaaactcatatagtattttttggacatatttttaaaggaaaggtggctatccctgaaacataatgtgttttgaagtataattaaaattatcataaatagaacagtattgaaccttcactccttatgtgtacaattgactttaacgtccttggcagtaggtatgtatttgctgcatcattacatggaaagaatattcactgatgaaaaagtcctctccaacttgaaagaaatgttttcacatatctctgtgagtatcagtaacctggtataagaccttctttcctatgtcctgacaaaagtttatacagcactttgactcttggtattttacaaaaatgtatgcatttgggctatagcaatgcaatgcaacatataaacatattttctgagaagcatgttttgttaaaaaaaataaaacaaacaggctttcaaaatagatgctgcatcataaagtttaagtatgtatggattttctatacataatccttcaacattcatcttctatgtgaatatgggcaatcttcaatttaaatggaaataacataaactaaaattttaagattttacctaaaatttgcaaaactcagtaatgttttaataacaaaaaccttatctatgtactatctaggatatgttttcagacatgttaatctttgaaattaaaaatttttgtactctcctcctccagaaaaaaaaaaacacctacaaaaggaaaagaaaccaactgtccttcagagtgaaatgtagactacttcaaaaaaacagtttcctatatttctagacttaatggtcttatttccgcccttggtatatattcatgtttaatgaatttcctgttgactttaaaaggaatttctactataggctattttaaaagaattacctatttcaagcttttcctggcatgtggttaaatcacttcctttgaagaaacaatactcaacctttttttgaagttaaaatttgaatgcgaaattcaagcattgtattgattttaatggatcaatttatttttctgtcttcaacacaccaatctttatatctgtaatttctgattctgcttttataatttctaactatgtaaaccaatttcaaaagatttgaaaatggcatatccaatagatgaaatgttttctttgtaaattaatataaaccaaattctagatattgttgttatatttgatactaatactgagtctaatacaatagacctgatttttccataaactgggattgagtagaaaactactaaaagataacgttctgatgaaattatctgtggcagtaagtttagtgtgctaacatgctaaaaatgtttttcacatataagattttattgtattactggcactgtttatcacttgtatagatgtatttttattgaaataaactttttaaaaacttaaatatatttaaaggggaaatgtagtcttctatatcttttttttttcagtacacattaaatagtaaagtaaaaaggatcacagagttaaaagattactcaggtagccaagcatggtggctcacacctgtaatcccagcactttgggagtcagaggcgggcagatcacctaaggtcaggagtttgagaccagcctgaccaacatggtgaaacaccaactctactaaaaatacaaattagccgggtgtggtggcagatgcctgtaatcccagctacttgggaggctgaggcatgagaatctcttgaacctaggaggcggaggttgcagtgagccaagatcgagcaagattgtgccattgcactccagcctggacaacaggagtgaaactctgtctcaaaaataaataaataaataaatgaataaaataaaattacccaggaatcacttaaaattatctaaagtatcaccactgagttgatgggaaaaaatttgtgcattacaaaacttgccctttaatttgcaggggtttcaggttttaagtaggaatcatcaacaacatgatcaaaaattcttctgcttcattattttcaaattgtatacacagtgttctctatacagtgtattaatcattatagagtataattcagtatgctgcatttatattttagagcttttttttttaggggtagaggaagaggttggcattggctgctaggtgaggttgtaaatgaagaaacaatataacctcgttagtttgtcctattctcatggcatgaactttgtaataccttagagaaaaagagaaagttaaagctgatttcagcttaattctagatctcctccaaatggcattaaaatagtttataacgtggctggatataatagtattcatggtggtttgttatccaaatttgtagctattcttttaccaggtatttctgtcgctatttctcagtttctcacaacactgcaattcttctctacctttgttatttcagctgttttataaaggtttattttggaaatgtatattgactacagtttcttgtgccactctcacttagctctttgtggtaaaggtcacatttatttgaagttgtagactttatggctgagtagtacgtcaaagccagccagtgtgcattcccactacttccctgaccctgactttggccttcaatacctcttgcctgtggtttgaaattcttttctcccagtcttaggtattttctcactcttgttcatggcagccctgatcatgttttattctggccaaaagccttcaaagttctgccttttgtcaagacctctttatctttaccctctatttgctctaccatctgcactgtgcttatgttctcattcctccccctacttgatacaaactggacaatcactgcatccttaggagattttacctttgcgtttgctgtcctttcttctcttcgttgagttttcctaaaaaccaatataaatttatttgtctgtaaatatcgacactcttccagatccagctcacattttgcctctcaccttaagctgcttgggttctcttttaatcctttgcagacagagtgaatatctcctcttctccctgaattgccattgtacttcctgcgattttattttatttcattgtattttactgtgttgtagctagattgcaatctcagcacagaagaaaggcatgggttttagagtcaggtatatctagttttagatctgttccctttgtaactgccctgaacataggctgtgctgtggtacatattcttttatattctagggactccactctttgcatgcacagttgcagttggcaataaatgtttaaaggatgaataaccacttattcatgaaggactgttattttaatatttatttaaacaatatcctgaagaatcctcaatttttttgctgcccacagagaaatcacttccttctccaaaaagtgtgcagttaaggagtttgtgagtgcaaattgaatgaaaatgtgccattaaggagatatctgaagatatgtgtgtgtgtgtgtgtgtgtgtgtgtgtgtgtgtgtgtatgtgtgtacaaagttagggaaagggaagtttgcttttactatcactgttttcctattttttttttcagttttgtatgtgctcattaaatgtagtcatttagaactattatagctgtggtcacttatgaatcctaaggccaatttcaaatttttaagtggaggggattgctggcgtatcctctcaattttgctctctcctctatgatttaccttctgggcagcaagatactagacaagaaaaatgtcacaagtttgcaaataggctatgtgaaaagttttattaatttaaataattgtgtcatatagttaggctcctgaatatactaatttgcttttatgccttcttatattttcaaaaccatgtgcttagcatagcaaaatttagtgctagatatatttgtcttaaacttagtccaagggcctaatgagaggaataagaaaataaggatttaattataagacatcctaatgtctaaagaaggccctcagtcagaaccctcatgctactcatgcacagagatgtctgtgattactctgaccactcttcttgtgtttacttaggactaaatgagtaaatgactgaatgtcagcactattaattaaatttgttgtagagtctctgatgcccctgaatcattttccagggaacatgctgttactaagcctctaaaaataattgcttagtgaacatataaaatgcccataaacttttcaatgctctatcttcaagaagaataatattcagaagagccttcttttaaatgacaaatgaagatttttccctcccttattagatgcctgtacattttaagttgaactttaaagacattgaatatagtgacttaagaacctttaagtttttacttcagcttaagtatttaaacaatttaaattggtatttaagaaatatttaaaaagttaaatcaaatattaaataaattaaatatcaattttattataataccctcccttattagatgcatgtattatttcaagggttgaaatatcaattttatttagaagtgtaggctcattatgtttcaaatttgaggaaagacatgagttttcagattgacattacactctgagtaaaataaagataaatctaaatatagacacatcatgataaaactacagaacctaaggaattaggagatgatctcaaaggagagaaagacattatctacaaaggaagaagtatcaaaacacagaagtcagaagacattggtataatgtattcaagcactattagaaaacaactgtcaacctggaattgtatacacaagtagtctcattatagaatgagtgcaaaataaagatattttcagacacatacacacacacccacacccacacaaaagaagtgtaggcttatttctaatttactgaagtcaatcacaagtgtattggtgctaaatgaagctactgcataccgaaacatttattgatatatagtttccaaaactcagtgaagatatttgaatatttgtaaaagagattataccaaatcatgttgatagtctaatttgggagaatctggaccatccaagcttgccagaaatgtatgaggtcataacagtacttgatgaactccttagagaatgcaatgcaatttctgattatatttcagactagtggctttgaatataccagagttattaaaaggaggacaaataaaattttgctgttgttacttcatgccttgttcaatctcgtgttaagtctagccaactagaattacttaaagtttgatttgttgtttctgtcagaaaaaagatacgatattcgtgatttaagcaaaatatttttttctgatttgggtggtgataataaaacaaaacattctggtgaatttactttttcattattagtaattattatcctagctataattttttatgtttaatttataggaccactatggaaatttgtagaccggtagagccagtatattctaaagcttctcttggctttttatcctatctccctttgaggtagtttgactaatagggcagggaataaagagagaatggcagtaactctcatggggcttgactaggatagaatcactagccaaccttcttacttggcacattgacaccacttttatgtaaaggtgaattttagtctgaaaattatgtaatgagcataaatgtttatcagcacttaactcttcatagatccttgatttctgagcctctgaaccaatgcttttgttgccactcatttagttattattcttgtacgcattgttgcaagtgatagaacaatgtagcagtaatatattttccgtatccttaaaatatagttgcagaagaattgtgtttattactttctttgcagtattctactataccagagtgggtttttagtacttcctgactgctttaaatgatgattaaccctactcatcttctctgcttcatttttgttagcttattctttaaatctgttggatcagaacctagctcacctggtgggatacttgaggttttctatattttacattatgcatattaagtccagatctaatatttcattatacatactatctgtgtaagctttaagagtttaatgataaattaataacagatattttattattttgtacatctactattgaatatttgatactttactatctttaattattagcaaaatcctgcaaaaataagtgaaatgttttacagatttaaaaatgaggctaagaggattaaaatagtttgccttttagatagtaataccttccttattgggttaatgtgaggattaagatacatatctgaagcagctcacccaaagcctggcaccgagtagccccccaacaaatgaaaattgttgttgctgttgtgactcttatcagtgccaatgtctgagctagtggtatagctgtggttctgtctgatctgaatctaaaatctatgttgactatatttgataccttttgaatttaaattcattgaacacttgatatagttttatttattcttcttatgtagcagtgttctcaattatttcaaagaagtcgtgttaatgaccttctggaatacgtttccattattggctttagcttccaaagcagtccagtaatgattagggctgacatcatgtttcatactgatgacactcttcctagaagctctgcaacagatggtggcctttgtgtagactcagcacagttctcctggactatgctcctgactcagcagaattcagcagacagtctgtacaaggcatcggtctgtggtggagagacttatctggaaaactagcagggaaaaagatgctaactaaaatgggtcgagggctctagctgaactctattctctgtgtggcattttgtgtcagacttaaaaaccatatggccagaaagctctttcactgtagggccagttagcaaatagcctggtgtcagattctagataaagcacaagtttacattttgcattgagaacatttttatctgaggcctctgtgttttacaaatgcacatgtgaaggcaagatgcctactgtacagaacatgcaattgatgaatgccctagggaataagataaggagatgagattcctgtaccaacatagggctctttgtttcacaagttttcatcattttggacaggattatttgaatctggcaatagatggacaaggctctgctctgcttgtgcctgtaaattgggaattatttctttgtgacatatgggaacatttctttgggggaaaagagaagtgtgtttacttttctaatgctccttacaagtttccttgggactggtcagatgacaaaactgtcagtgacaggactgagactgtagaggctatttactatgaagttaatggaccacaggcttcagggctccttattttttcaggctgtgtccaagaccctgcatcttattcacatgaccatatgtaacatttgcaattaagatgatttaaacataatcaggttaaactgtgcacttctactcctatttgtcatatttcttttagtgtaaaaaatggtgttagagtggacatggacaattttgaattctggctaatgggatgctgagttagggatacatttattttgcacttagtagaatattttggtgtgagccatatgaaagtggcattttttgaggttgaaaatgatggagcactgacaatttcacatggccaacctaatatttatggtggttcaaaattagttcagtgtataatgaagttatttctgctgttctggtaaagaaatatctcccaggaaacttcctacttctcccactgcttccaaatgatcctacatgcccagagtgatgagtaaaagtacataccaagaggtcattttgtaatatgtatgtgtctgagagcatctggtaccaaaagcatttggagagagaggaaacaccaccatcaccaccactttgatctagaattggagagcaatcataataacatatctgattacctttcacaggaaaaggagtgtaataggatgaaaatacattgtaagatggctatgaggttatatttctagggttaagattagagcacatttcagaaaccttatagcaacttaatctctctatttccatttctctctatcttctctcaaccttgtttattcccatcttccctttcaggaaaatgaagacagtcagggatcatcaataaatgagattcgtctcttaatgaaactgggagtggatggggaagaccttttctagggatatcttctagcgtttttctacttctgtttctcttaatgccatattatcctggttgctattttgcctcgccaactgaggtggcctaggaggtgctactagaatcagcaaaaatatattgcttgctaattaattatccttcaacataaattcctcagttttcacaagtaaaacagatgtttgctcttctgccctatggttttatcttttcctttagttgcatcagctttggggagtctgagaagctgtaacagaataagtaatgtttttctgattactgcatacaatgagttctaaatgtcacaaataatttacaaaatcaaggaattgcagattcacctaatgtctgtttcttaaagagcttttctttaataaactcttgccagggggatggagtgtcctatgagaggccttacttggtttattcatgatgaatatgagtatacacgatgaatacttaaacatttaatactatcttgccttttggaatataacacataaacataccttcttttccactttttagaagtcagaagcatctatgatacggatcaaacatcatgaatcaactcataaatcacttgcaatgcaaaagggtctcgggacactcactgcatttattctctgtatttattctcactgtatttattctctcagcttctttttcacaggtggtctcaggctgtctgcttccctccttcaatcatcagtatttttctcaaggcagccctctctattggactctttttttttttgagtttctgttatcttctcttcctcttcttccttcaggctggaggaggcaatagcactattattaccatgccaatggttctatattttacgttctggttttattacatccctcttgtacccttgtaaacagttctttattcaactgcactgtttgtctgaatttaatgcagcacccaattcctgggatcctgactgataaggatgctagtctaggaataggtagtctaggaataggtttgacattatcagtgacatgtgaagtaggtgaagaaaaaagccatggaggtgtgtgggggaaagaaccatctgcatagaaaaacagtagctttattcttggaatgttggattgacaatgaagtggactgggtggctgaaatgaagtgggagagaagtaggaaattaagtcagagaggtagtagaatgaggtgggaagatcacagagtgcctttatagggcatatactcagaatgagattagaaattagcggaggtgatgataagcttataatgtgtcacttttgctactatttggagaataatctctatggggacaaagatggaagcagggaggccagttaggagtctgttgagaaaggcaatggtgattgtagaagcaaagatagtgagaagcgatggggttcgtgatgtattttggcaagatggggacaggatttgctgatggatataggatattaagagaggaatctagaattatgccaagtttagcaactgggtggatggatctgtcttttctgataggagaatagtcattggaggaagagtttagggagaaagatcaggaatttgattttgtacctgttaactttgagatgcgccaaagtagttgtatttaggcagttcatgggaaatgtgtaggctagagatacaaattgaggagtcgtcatcatataggtagtatttaaagttatgaaacatactcaaattacctaggctgttgattctcaaattatttagttggatatttgtaaatatagttttcactgtaaatatatggtggttaggtcatttcagtcagcatttaaaataattcttaagattaggtaagtattttataaaaataaacttatctattttataattagcaagtatactacctaagtacctataaataggtatatccataaaatactgacatgtctatgtaaactcaggtagacatataaagtatgtataacacaagaactatgtttgaaaatattatttgtctttttggtgggcacttttaaatgtcagaaagtgagagtaatcactgattttcctgccaaacagaattaaattacaactctgagaggagaacataaggagtgttattgcagctatccttgaaatgtcagactgcttttaaaatgtgattattttaagccctttgtttacactgtggcatctttatatgtaaaaaaatttaaacacttgggcattctgtgatttatgtctaacttttagtattttgaataaaaggcaatttgcaatagtaaagaaatctttattaccaaaaacagtagactaggagtcagaagtgtggatttctagaatattttgtcaccaacaagccatgtaaatttataatactgaacttctctgggcttcgtattctttgtttgaaaatgaaaaggttcatctggattactggtgtttccacagttccatagatgtctctctctcagctcccccgacaatgggtcaggtatgccaaagatgcctgggtccttcactctgtttcaaccagagccttgagcttttacttgttctttgttagtgctactaagaagatgttttgaaccacaagatcaccagttaaatggtcttaatcttgtgtaggaaaaaaaagtttcaattagttatgtaccaagtttttgttagatttgagagctgccttatgactaaagcactccctacaaaacatatcccgctaatttcacaaccatcttcccaggtaactattctttttgttttctttttctttttgtctctgaagtataattgagccttagcattctttaattatagagtcttaggatcttacagttgagacaggccttagaaataatctctttcagcctctttcctgatacagaatgaacaccacatccctgagactagttatccaaaatctatttgcagggtgccaggggctcatcaactgggatggtaatccattccattttgtaatagcttttatgttttcttttgtgcagccaaaataaatatctttcaaacccctactttttggccattttactgtagtgatttgaaaacactatctgtggttagtggctctaaatttactatacataagaatcacttagagcattaagttgaatattccagaactccatatccaaagattatttcaatagatcagggatggagttcagcaaatttacattttttgcaaacatttgatttgattataaatttagattgttattataacaacacataatcttgtggattggaaaattctgttatagtttgtataatgtgattccattttggtatgtaatgacatttatgtatttaaaaaatccatttaggaggatatcctcaaaatgttatcaatgcttgattatttctgattgttgggaaaatggacaaattatacttttacttatttttacattcctaatgtaaagataatgatttctacaattattacatataacttttatcattaaaatatttaatgggcaacttatatttttacttgtcttcatatcttgtttctgtaatgactatattgttattaaaatgaaaaaaatttaatgagtaatttatctccccactacttatcataaagatgattttgtagaaggtagagatttgcaaggatgacagagatgtagctcatacggcaacattcctattgatactgagtgttttcagggtacattagagtaagggtccttgggtacaaaattctgactcttccaatattctctaagggaggatgatgatagcattaatagtcatctcattattcagtacaaggccattccatcggtcatttctttattcttttttttttttttttttgagacagttttgctctgtcatccaggctggagtgcagcggcacaatctcggctcactgcaacctccacctcccaggtgcaagccattctcctgcctcagcctcccgagtagctgggactacaggcatgtgccaccacacctggctaatttttgtatttttagtagagacgaggtttcgccatgttggccaggctggtcttgaactcctgaccttaagtgacacctgccttgggctctgaaagtgctgggattacaggcatgagccatcgtgccaaatctcatttattcttttaacaaacacttgtgttccaggatctgtgccagtcatgagagccagaaagaaaaacctgtgtacctaattcctactatagcaggggaagaaaaagtggcataaataacagatgtgctgtctatgcctgggaagctctggggtggtttcactgcagagtggctgaatgaggggaatcttgaaagtgaggatcagtcttatccaagcagatgtgggatgggagagactttttctttgaaaggccctatgcaaagctacagaaatgtgacctagtgtgttataaattcagaactgtgagtaatttgatatggttagagcactgcatacccatagggaatttcatgaggtaactttgggtggaaaagcaggatctcaattttgcggtaacttatatgccattttaaagagcttggataagtagcttcgtcagcttttgtattgtggcagcagtatggcaggtatacactgagtgtggtggctcatgcctgtaatcccagcagttttgggaggacatggctggcggattgcctgaacccaggagctccagaccagcctaggcaatatagtgagacctcgtctctacaaaaaataaaaacattagcggggcatggtggtgtgtgcctgcagccccagctattagggaggctgaggtgggagcattgcttgaacccaggagactgaggcttacagtgagccaagatcatgccactgcactccagcatgggtgacagggagagaccttgtctaaaaaaaaaaaaaaatttggcaggtatactgaagggaatggctacagatagaaagacagattagaagactattctaatactaagaagcattttgaggcaagcgttattaaggggttgaaaatagtattccagatattcaagcaggtgacaatattttgggcaaatatctcttactaagtaagaggcaattggtttaggcaagccaggattaattctctttgtgttttttgtttctaactcaaagtaggtagtaattatgtacagcatctcttaatctgtaaactcttatcttctcttttctaatcaccccaagaaactattaatcttagcttaaggaaaataaaggataactttaacttccagtgtctgttaaaaggagagttcattttgtactccttagggttgaagaagttgtatgttaagaaaagccaatttagaagacatgtaattttacaattactagtgttctcttacttgaattttaatgacaatactaccactctgaattttgttatgtgctttgccctcaagcctgtgaacagcagtttgaaaccatatgattctctgagatctctccttaagaccagctgcagttcggatgtgatcactcattgttctataataagcagcttagacccaactagccaccctttggactgagaccatacaaagctgtttctgtcccacataggcagggactccgtgcactccaggctcagctgcagggcctgctgaattaatcaaagggttcttagaccacattccctaaagactagggaatttctgtagtgactccaccccaacgctgaactccttgccctttttaaatgttcttctgacagctggggacctgagagcagtctaactcccagaagataactttggaagagtgttcccaaaagtttattgaggagaaatgtagaattacatgctcttttgcctgtcagaatttatgaaaaaagttaatttgcaattaataacgttggtaagcattctagaatataataggcactgcatttagtgccttactttcactatgtcacttagttccggtaacaccttatcagatacttataattatttctgttttacaaaggaggaaatggagagcctactgggatatggatgtctgacaacttaggacaagtggttctcaactctggctacacattgaaaccacctgaaaagcttttttaaaattcagacttctgggtctatagcagataaatttgattaaaatctctgggggtgtggtccatgtataagagttttaaaacaaaggaagccttctcaggttgattcccatttgcagctaggattgacaagtctagtcctgatgtgtctgagactcataccttatcaaatcatggtccctcgctcagcagcatttgtatcaggtagaaatccagagtattaggactgtccatgaccgactatatcaaaatccaaattgtaaacagatctctaggcaactatttgtattgcctttgcaacttttctgtaattccaaagctattataaaattaaaattgtttattaggggaataaaagatcatatttgggatagaaaggtcaatacctttcctccagaaactctgtctagcaagagagaaacttattaaaaggaatctgctacaagttgtgatggaaataatgcaaaatgtgctgtcatggtataggaggaaatgaaaaacgctgcttggaggaattagagaaaattgccaaaggaaggtgacttgaaggcacttcaggcacagagaaagatatacggaacaatttttaaaagagaagttgctgatataaaaggaatttaaaaaggaacataagcctttgctttgattaaaatgtaatgtttaatacacatgtgtatatttttgatatatcataaactgtaactgaaaattgagaattagtgccagactagaaaggtaatataataattaatggaagagtttatttctcttttctggggaaagcagagtaaattaattatttataacattaacacttttggcaggggggaagagacttttttgattaattctctcttcttgtggctgttgtgacccttttctctcttgattcatcagtttgttgtatatgccatgcttaaattctctactgggccctttcagatgttttctttgcatttacaaagaacttctgagcatatccaacccttttaatcctggttacctcatcttcaccctacagctaggtttctgctcagaatcgcttctaaaaagcccttgctaattatttgcagtgtggattgggtaccattcttttgggtccccgtagcatcctgtatacatcacattgctgcaaattttcgttttctctgtttctgtcattaactaataagtaccttgaaggcaagggctattttcagtgacttccgtgtctatagtactttgcataggatttgacgcaaaaaaatgctttgaaataatcccttcaagtgacaacaaaagcctatttttgcccttagtttatagtaacaagataatctttggagatggcaattaaagattgaaatgcagttagcattaggagctagcaagaaacttagagacttcaacttgtatgtaacacatgcctggcataaagcagaattttggttgtgtgaaagtgggaacactctcattttatacatgagggctttctgatttagattatgttacagatatgtctcccttagcatattattaagagaatataaactcagatatggatatcattgttcataaattaataataattgtataccttccaattatgaaatacctatgcatgttgtgttataaagtgctctttacatatatgattatatttaattctctgaaaaatcctaagcaggttatattagattggggggcacagacttggacttagaaatgtataattataaaacgcatgttttttccctagtcaatgtcctttctgctctgccctgctgcctttctttaagaagcagctgaaacttctgatatttttctcttccaggagattgcgtggttgggaatcaagaacttgccctttgatcactaatttactgtgtgattatatacaaatcactgagcctctctttctcagtctacatgtttgtgaaatgggcctattgaactatatcatgaatttattcttatgcaacatatatttgaaagcctgctatgagccagatactgttctaggtgctgaagatacagcatcaaaaaggacagacaagatccctaatctcacagagctttcattatggcatatcaggctgaaaataaacatattaaataaaatcatgtagtgattaacatcatgaagcagataaatggaaaaacaaggaagaatgtggctggagtgtcctggaatgtggtgggagacatccatggatgaggtggtctggaaagtcttcactgaagaaataacatttggtatctgagaacaaagcaatagttagcatgaatatatgtgggcatgtagatttgaaggctgaaggaggctcaaggctagaaattctaaggctataaaagttttgcttataggaggaccactaaaagactagtgtagctggtgggaaaagtggcaggagacaaggtgagaagttggcaggtctagatcatggacttatagtcaatggtttcaggctgtttctcaaacaccagtgtgcagatactctagggcaatccatgataattttttcatatctttgatgcctttgttacctttgacacctttgataattccttccaactctgtgatacctttcatggttttagaaaatctttccttgtgagtagtttcccagaatagaaaccagaaacttgcttctcctataaatatatctgtatctatatctatatctatatctatatctatatctatatctatatctatatctatctatatatttttttctttccaaagtcttgttctgtcatccaggctggagtgcaatggtaagatcttggctcactgcaacctctgcctcccggattcaagtgattcttctttctcagcctcctgagtagctgggattacaggcatgcgccaccacgcccagctagtttttgtatttttagtagagatgggggtttcatcatgttgaccaggctggtcacgaaatcctgacctcaagtgatccacccaccttggcctcccaaaatgctgggattacagatgtgagccaccgcgcccggccctccaacttcttttgcatctagaatgcaggcatatgacccaggctctgtcagtgagctacaaataggtacctaacactttgaactggaaattagtgacaaaaaacaaggcccatgcaataaatccggtgatgatagtggaagctacactttgttaccagggaaagccatggtagagcttataaaatagtgtgttgtacccagatcttggttagcaaagtagactttggtgagtgtgcctggtgatggtagtcgtgctgagctcacagaaccagctttatattgttatttcagtctattcctgactgcacagcctggttctctggccaccttggaatttctataagtctgtaatatccttccataaatttcttttttacttaaattaactagggtccatttacattgtttgtgagtaagaactctgtgccaaagccttgaacttgaaaggaagggacagggagatttcctgtctgtgtccgagaagcactagatccatgagattaattccaactctaaattcttgggctaatttctggacaaaaatgaactggagatgtaaattctgcttatttcaaagtcctgttttccgtatttgtattttcaaaattagtatttgtaattcctttaattataaattaaattcctttaatttaaagagcaggttcttgtacaaagatactaccttccctctagatttaagatcttactaggctcctcaatatatcattgatatatcattgatgaacaattcctctctgagatcacccctcattggtacaactgaagtatttaattattaaccacaatcttaagaatatatttgtttttggggaaaacaatttttttttttttttttgagtcagagtctcactctgtctcccaggctggagtgctgtggtgagaccagagctcactgcagtctccatctcccagggctcactgcagtctccatctcccaggctcaagtgatcctcccacttcagcctcccaagtagccggaactacaagtgcatcccaccacacccagctaatttctaagttttttgtagtgacggggtcttgctctgttgccagggctggtcttgaactcctaggctcaagcaaccctcccacctcggcccttccaaagtgctgggattacaagtgtgagccaccatgcctacacttggagaaatttttgatgtctgtttagtaataatactttcaataaaatatgtcatcagcattttatgaagtcagctatattgcatctgagaaacggcttctaaaatttatgtgtttcttagtagctgtacaagagtaaggtgaaaatgtgtttataattttcaccactcccatctgtccagtactagtgccaggctaatctcagaagaattgttaaaaaggtagctacttctctaaaatgactttccattttcacctctttggctacccttccactctgtgtggaagttctgaatcttcaccaactactgacagttttatttcctagaagttattcttataattgtagttaagtttttcttttttattgacatgttgggtacaatgctctttatgatgactactagcaaagaaaatccatcttccagtgcctctgtaggtaaaaatggtgattgactcctagaaatagttagcttattgtttaccttgatgaaaattgcttaatttttacaaatagaagacatgaggtactcttatttttcttgtttaaaggccagttttctatgataccagtatacacatttaaaagcagctcactttgaatatcagtttaaaagcagatatttgacttgaaatgtctttgtgtgagatgttatcattagacttatgcagatttaggcttggctttgcttgtgaattatcagagactttctgtttagatgatgctttgtcagtatgtttttggtgtttcaagtttatagtcacttgagcattatcacctagggatattctctttgtcattagatgggttttagagatgctttggatggaaaattctcaccctagaacatctttttggctgtcttggtttcccccttttgttttaagacatggtatacatttttaattatacattacttaaaaactaaggttggaaatgcacatttgttgtctcattggggaagttttgagaaattgaagttaaatcctcagcatttgcaaaagaataccatatttcctgcatagcctgtagaaccattagccaattaaacctgttaaactaaggtttcaaaataaccatcattctaggttatgggtacatgaaggtttactatgttttcctgtctgctttgtcttttgatatatttgattttctacataataaaagcttaaaaagaaaacattatatgttagtttaatgtaaccctgtgacctaggcaattcactgggcttctttgagcttcagcatccttatttgtaaaataggaatcactgcctcatttataggattaggattttatcagaaaatgaatgctctagtgttccaatgtggactttaaagtactgttcacttgttgagtattaattaaaaaggactttgtgcaagtgtcactcaatatggatgaacctaaaaagaacgagagagatttgtataattgttttttgtattaaaataatgtaggatcatagaatctaagagaggggatggactacctttaggaggtggtcacttacgaaatgatgaaatgaaagtaagcataacttggggcaaggaacccttcagtttctgtgttagagaagggaatagtgaacttagttaaatatagatgatgttaggtcattttcatattgctataaagaaatacctgagactgggtaatttatcaataaaacaggtttaattggctaatggttctgcagactatgcaggaaatatggtactggtgagacaggaaatttttcttgaccccttcacaggccttgcaacaggggtgccttgcttactcagcccatagctctctacccctcgcgggagggggagatgcagatgagtgggtgcaggagttggggcaagtgcttctgggcaccagcaggagcaaaactctgtgtgggtctgcagggcagcatctgttggggagtactcatgacccctgaagcctcagagggcttgtgttgccatgtgctcttttagctttgctgtcgtggatgacttaagtgttaaatagctcagtaggccctctgtctttttgtgtgaggtgattgctttctgctagtgagggcagagggtaagtatgacagcctttagcatcagcacccgtcacacccgagctctttttcggcatccgggaaaaatcagatcgcacaaacgaattgaagggtggtgaatgcagaggactttattgcccatggaggtggcactcagtgggaaggggagttggaaaggggagggagcgggaaagtattcttcccgtgaagaacagtcatttctggctggactgaactctgaagtcacgccatcaagccgtctctctgaaatcaatctgcttctctccgacattcagctgtttcttcttttctcctcttctctgctctctgccagtggagcctggggtttttatgggtacaggataggggatgggacaggtcaggggtggttttggaaaaggcagcttttgaatgggaaaacaggaatgcatgttctcactttgggctgtggttccgggcttgagaggtggggcttcaccagggaccctgaccttttctgcctagaatttctttgcctcctgttcctatcactggcatctacttggcttccggggagacctcagggagcttttactcatggtagaaggtgaagcaggagcaggcacatcgcatggtgaaagcaggagcaaaagacagagaggatgggaaggtgccgcacacttctaaacagccagatctcatgagaactcactgtcacagcacagtgccaaggggatgatgctaaaccattcatgagaaatccactcctgtcatccaatcacctcccacaaggctccacctccaatattggggattataattcaacatgagattgagatgggacagttatcatcataaaggataactgtttctttgttgggggacatccttgatactgtcttatttaataccagttttgctgcctgctggagaaaaaagactagactggcttctccgagagtctcaggggaatttatatctgctataaaggatcgattttcagacaatacattatgaaaacttaattctaactaatagcagataacatttattcagagcttactgtgtgccaagaaatgtacagtttttaatataaattatcacatttctttctcaaaagtacataattaaagattgcttttttttcattacatggatgagataggaaattatggctcagagaggttaatactttgcctaaagtcataaaactaaaaaagtgatagaactaagaatagaaattgctagtctaactctacaacttgtggtttgtattataccatattgggctctttacagcaattaattcagtctaggcacttaactttttttgttttcttacctctttctatacactcctttagtgtgctatatgagcagatatatttgagattttattataacagtcctaaaagtccatttttagaagtagaaagaacataaacaaaaatatatcaatacatgtaagtgattaaatattgggttagtaatggctagaagtgctataacaaataccatacacttggtggctgaaagcagcagacatttattctctcacagttctggaggccggaagttcaaaatcagtggttgggttggtttggcagggttggtttcttctggaggctctgagggaaaatctgtttcacgagtctctcctagcccttggtggtggctggtagtccttggcacatggctgcatgactctaatctttgtctataccttcacatggttttcctccatgtctctttgtgtctcagatctctccttttataaggacactgatcatcactggatttagggcctaccctaaatccaggatgattttatctgaatttttttaaccttatgaagtacatctacaaagagactatttccagataaggtcacattcacagataccgggggttaggacttggacatatcttttggggaccactatttttaaaccatactattttgagcatttgtattaaagaaacagatgagagaatacaatacaaacttgggtttcatatcatctcaattcacagattacttagttttaagtgtgttttatagaagaatgttattgtatgtacattatcttaatgccacagctatcctccaaagattttagacttaaatctcattttcgttttgctacttctctagtaaaaatgtgtgctgctctatatctttctgttattcccaggatatatactattacagatgtacttttagttcctcatcacttgaaaatttgatatttgaaatttcttctaagggactctaaatggtaaaaatataacacatatttcagtcctaaaacagttacgtagactgcttcatgatataaaatgctactactaaatttagtgaagagataatgaattcaaaagattgtcatggcaaagaaaatgtaataatatttggtgattgactaaaattggaagcaccttagagagaaaagacaaagacacactaaagttgacatcagacaaatctggatgttattctcagcattttgcaagttctgttcctctacagagtggaataggaaaaaaaaaacatagaataaaatgcatggaagggtgaccacagcctgttgattcttaatagccttggagaggataattcatgaagaaatgtggacagcaaattttgaaagtgcttttagatataaaaataagaaaaccaagaaggataggtgatctatacatacttaaagcaatcaatactttttttttacacaaaattaaaatgtttgattttagacagtgtagtggcacattagggaggcgatgttaactgaacaataaaagcttgtagtgtacagttagagtagacgtcctcttatctgatagcatcgtgactatatagtttataaggtaatagtaaaagatccttaaagcgaattacaaaaagacgcatatctacttaaactattttattttaactgaaagcttatacagatgtatttacctgtgaaacttttcttctaaattaaggcttttctttgagcatgattctgctgattgcagttctacaaagactttcttatgtgacaaatacccattacagataatctcattatttcctcaaagggtaggagaacttagggacacctatactgtgatctaagttcaaatttcttctatgttttaataatttcctctcaactttttatttttattttttatttttgagacagagtctcgttctgtcacccagacgggagggagtgtagtggcgtgatctcggctcactacaaccttcacctcccaggttcaagcaattctcctgcctcagcctctcaaatagcaaatagctgggactgtgggcatgtgccaccatgccggctaatttctgtgtttttagtagagattgggtttcaccatgttggccaggctggcctcgaactcccgacctcaagtgagcccccgcctcagcctcccaaagtgctaggattacaggcatgagccaccacgcctggccctctcaaccttttatagctgttttgcacatatataacgtggcagtagggagtaaatacctgactaaattgtgatttgattagaaagaaggaatgaggatatatgcttgtttggcagccaactgtttttagtacagtaagcatatgaaagaattagttgaagacaactgcttgaatataaattgggcaaagtctagtacctatgagtgtgcagatagctatgggcaccagtaggtgtggttgacacttcgatggagagaatcagtctggtgagtggtgagctggttaagtggaactctgttttgagaacatctattctaattgtgctttaaaagtgttgcaaaaagctcacataaaattcgaggggaaaggatttgcagagccggttagatttcagcaaacttttaaggacaagatagtagagagatttatgataagaaggcgagtatttgctttatgggcttgagaaattattaattcctggcatttgtatcatagactgagagatgacgggagagacatttccagaattgatttcagaacatgagagagcatttctgtgaccactgggtcatccagttgtgtggctattcttgggtggtcttttccttggtgaccattctcatctcacttgagcacaggccagagactgattgtagatgtgacactcttggattttttaaaactgtactcattgcaaatacacacatgcacatacctatgtacacacagaaacatatacacacatatatgtacatatacacacatttagttaaagatcaaattatttgaacagttatatctttcaaaataaatagatatgtcttgcaatgtacttttttaaaaaaagtatagctttgttattttaaaacaattaggatcttattttcatgagtagtaaattttatgccagaactctgggcaattcttataaatatctgccttctttaaaacctcagagtatgtacttcaggctctgacaaaggtacactttttgctaactaagtgtggttttgaaaaattatcttcttttttgttttcatgaccagtttgtagagctagctgtgaagcagatggaccccctcctctccatgcagttacgcaagaccgtttccctaaatcattagcaacacaccactctcctaagcgttttgcactatctgccagttgctcctgctgtcacaacagaacacttcaaatggttctcaagatcatttttactttactgattttctcaaatcctctaacaagcttcactacaccttaggtaccctgttgcatttcacaggagactatgagaggcagctgtctcagaggacaagaaacaggatagaatgtacccaggaagacaggggaacaattttttaaaaaagaaataataaccatggtcaagtgctgaaaggttaagtaaaggagtgattaaatatgatcattggattgagagtttgagggttattgttgcctgttgaaaatagttttagctgggtggtgaatataaagtaagttgctgtggtttcaccagtatgtatgaaatgaggaaatgtgaatattgtgtgtgggccactctttcaagaaggctagctgtgaatggaaagaggcaggatgaagataagatttcatttaagattaaaaagatgcaagtgcatttataaagaagtccataaagaggggtagaagtttagaagagaggagaaaatgatgtattttggtcttattccctcttccttaaagtgttcgtattcattcattcaaatacttattaaacaataacccctaatatttcttgcatatactgaatgtgtcactctgtctgatgttatgggaagaggactataaggtcttattcatgctctttggaatttatagtttaatgccataacacaaaatgtgaatagggatcattcctgctttgagcatattctttagcagtgtttaatatggcctatttttatggagagtcatgatttaatagacctatctggataaatcacagagtggatattccttttaacctcgacaccaaaaccagaagtaattcctgccttacaggctgtagtcctaagcagtgttttgtcaggcttctattaagatgatatggcttaacccagggtagggttaaatccatgtaatgatcagttgtattataataggatgttggcttgagcccaaaaagaactctccaaggcatagcagaaatctccgggttaatgagatcccctgatgagtcaagtaatgcctccaaatgcttattacagtagttgtttagtggcttctagacttaagtgtaaacaaatttttaatgaaggctaataacagagtctttaagaaaacaaacaagaaaaggtttttagattttttacaacaataatctctttttttttctttcttttcttctttttctttttgagacggagtcttgctctgttgcccaggctggagtgcagtggtgcgatctcgggtcactacaagctccgcctcctgggttcacgccattctcctgcctcagcctcccgagtaactgggactacaggcgccggccaccacgcccggctaattttttgtatttatccatggtgagtatttgataaatcatagtataaaaattgttttacttcccagcactttgggaggctgaggcgggcgaatcatgaggtcaagagattgagaacatcctggccaacttggtgaaaccccgtctcaactaaaaatacaaaaattagctgggcgtggtggcaggcgcctgtaatcccaactactcaggaggctgagacaggagaatagctggaacccgggaggcagagcttgcagtgagccgagatcgtgccactgtactccagcctggtgacagagaaagactccgtctcaaaaaaaaaaaaaaattgttttgcttttagagagtgcattgttctttacagctgataaagcactgcaataagcattattgctctcgattcacaacatcactgatccataggcagaggaggtattgctattattttatcacaaataaggaaattgggactcagaaaaattagtagcaatagctgcaggttgagggcttttgcaccaggcatagtgttaagaaatttactctatgctgtagaatttattattaactggattttgtggttgagaaaattgaaaagaagttaagtaacttattcaagtgtatgtgacaggtaagtgacagccatagcacaaacccgggaagatggacccaacagcactctgagctcctaatcgtaatgctttgctgcctttttagggtttccacacatgagttgttgttgctgtttttccttcttctctgggtcttctaataaaacttctaataaaaataaactgtcagaaacaatgcatttattatgtaatatagttatctaaatgttcttcaaaaagtccaaaaaagtcagtgacttaactatatattaagtcagcttaatatatagtcatgcttttaattagcacacgtgtagtttcagcttctagtcagtgactatctcaaagcatttttttttttttttttgagacagggtcttgctctgtcacccaggctggagtgctgtagtgtgatcatggctcactgcaaccttaacttcccaggctcaagtgatcctcccacctcatactcttgaataattgggactacaggcacatgccaccacgcccaactaatttctttttctattttttgtagagatggcattttgccatgttgcccagactattctagaattcctgatctcaagcagtctgcccacctgggactttaaaagccctgggattccaggcatgagccaccatgcctggcctcaaagcatttttgtttgttttaattgaagaattaacagtcattatctgctgaaatgaattatggaacttattatcaactgaagccagcttgtgtttattttcctatgaaaatattctagatgtagtagatgtcaaagaaataaaattcagtgcggaagtaacttattgtgaaacttttgagaaactcatgaatttataaagcaattgaaaaacgtgttattcaaaatatttattataatgagacttaattgatataataggagatatattaatgttacatggcaatttctctgatactattttaaaatatatttaagaaaaattctaaacacattgttgaataataatctgcttttaatagattcagtgtcagacccggaatatcaggaagttatctggtcaaacctgtaactattaactgaagcactggcctttttactgcctttatcaactaacagtggtaacactgaaatatgtcatccatccagtaattgctggagtatcatatgaatcttgcctcatgatttgaatgtagtatgttgctgatattactcagtgttcctgtagattaaacatatatttatgaaaacaccaattcctctcccatgaagatgggtataaggaggaagtgttagataaaagcatagtcttgaatttgttttctagttgcatatctgaaacaaacaagcagaatatcacgatactgaaaggtgaaaatgaagagttacagtgttttattttgaaataattatcatttcataagagtttcaaaaatacaagagaagtcccatacactcatcacccagcttctccagtggtaacatcttacctgactgtagtactgttgagggacttgagcatctgtggattttggtatctgtaggggggccctggaaccagtccccctccgatatcgaaggatgaccgtactttatcttctatcagtaaatgatctaaagcaatagttgcctaagtatgaaccgattttgcaaacattgaaaagtaatacctttttctcaatagtagatggaaattattgaaaccttctgacatatcaaaaaattgaatattaaaatctatttcaaaaagaaaactcattcacatttcatcttaaaacacagattaacccggaatgcattcaaagttttgttatttttttaaacttccacaatccaagcaatgtctctacaaatgcatcattttaatgtatcatgttctgtttatgcattcattggttgacaggcatttgggttgtttccacagtttgtctattttgaaatatgctgctctgaacatttgtatacaagttttttatggacacagtttctcttgggtatgaaccttggagtggaattactgggtcatatggtaactctatgtttaatattttgagggcctgtcaaactgtttcccaaagtggctgcagtattttacaatcctatcaacaatatatgagggttccaatttcttttcatgcttgccaatacttgttaatgtgttgtaattttagccatcctagtgggtgtgtagtggcatctctttgtggctttgatttgcatttctctgatggctaatgatattggatatcttttcatgtgcttattaatcatctgtatatcttctttagagaaatgtgtactcagatattttgctcagtttttaattgagttgtctttttattgttgagttgttctctatcagatgtatgatttgcaaatattttctgcaattctgtggattgtcttcactttcttgatgtggtcctgtgaaacaaaacttttatattttgatgaaaatatttgatgatgtatatattttattttattgtttttctgtttgatttcatatgtgggaaactattgcctaaatcaagatcatgaaaattatggctatgtcttcttctaagagttttacagttgtagctgtttcagtaagctctataaactattgtcagtgaaattttgtgtataatatgacatagggggtccaacttcattattttacatctggatccccagttgtgccagcaccatttgtttaaaagactattatttccccaatgatttgtcttggcacctttgcaaaaaatcaattggctatacatataagggtttatttctggattttcaattctactccattgatgtataggcctagatttatgccaggaccacactgtcttaattactttagctttgtagtacattttaaaattgggaagcatatcttccaactttttttagtattattttgtccattctgggttccttgtatttctatatgaattttgggatcagattatcaatttcttcaagaaaggcagctgaaattttgataaggattgcattagatctgtaggttaagttggaaaatattgccattttaacaatattaagtctacagtgtataagcctagggtatatttgccagttcttctctaatttctttcaacaatgtgtttttagttttcagtgaacacatttcgcacttttttgttacatttattttatgtagtttcttcttcatgttattataaatggaatggtttccttaattttattttcaaattgttaactgcctgtgtgtagaaatataactgatttttatatatacattttactgaactcgtttattagttgtcataggtttctttattgtttttactggaatttctatatatgggatcttgtcatctgtgaatagagatagttatagttcctccttttcaatgtggatggctttttttttcttaactaaatttgtaggttcaaattttacaatataacaagtttaattgtaacaaatttttgaaaaacatgattatattaattttggtatctgttccaatacacattttctgtacaccagtagatgaacctggagagcaaatcattctcattttgtaacgtagatgtcagcaaatatttattgaatgcaacattatttccaggaatgtgctaggcattgtagagtttagaaagaaaatgagctttgtttataaacttaatttcatagagaagccaagtctcaacatgcttgaaatagctccaaggaaaatatagtactgaatacaaatttggtggatattggggaaactaatatgatgtttcagaccaatgtaagtattaggactatggaaaaggcagaaaatggccttattcttttaaaaaatggttggaatttgacaattagctcttagaaaaataattcagaggatggaatatagtttgagtaggacttaaaaaaagaagactaattagaagtattttttttattaggcagatataaagtggaaagtttaattttaatgaaaatagaaaaaagatgaggagagaacttttgagggacaaaaaataagacttgatgaaagaggattatgacagaattaagggaagggaaagagaggtcctatgacttgttcaatgtcccaaagctatgagtgacagaaataggacttaaaataacgcttctgacttcaaaccctgtgtttataccatgctgcatttcaggagtaactatgaggggtagtaggctttaatacgtccccccaaatttcaagtcgcctaccattgatccaactcatgttcctaagtaggaaaaatgttaaatttttcactgaagtgcaccttatagcacagtaatgtaaactcttgatccatgcattctagaggttatagccaaggatgttcatgataagtaggaaaaaagagctatatttatattaaaaatttacatgaatgtattccaatctataatatgaaacttatacattcattagctttatgagaccatgttacatcaatttgaacatccaaatgtaatcatactgcaggagcaattacaacttagtagtcatatcatgctcttcctcaatcatttaatgtgagaattcctgtacatacttctcgtattaaatttcttcatttattcagtaaatatttgcttcatatttactccattccaagccccacgagaagaaattatggctttgttaaataaagaaggcagcttgcttcttatactagctaagtttctcttaactatcccatttttttttgtctggcatgtatccctgtttgccagagaaaatctgagtttgcactagttgttctggaaccctgtcaagttagctcacttttcactttcagatgtgaaccaatttgaatgataaattgcatcgtcacctgtaatggctaattttatgtgtcagcttgactaggtcacggtgtgcctagacatttggtcaaatgttattctggatgtttctgtgagggtgtgaggatgagacatttgaattgaataaagctgattgccctctctaatgtgggtgggcctcgttcaatcaactggagatttgaatataacaaaaaggttgagtgagatggaatttcttctgcctagctgcatgagctggaacactggtcttttctggccttcagacttggactgatgtcttactggctattcttggatcttgagcctataggattttcaactagaacttactccattggctttcctgattctcaggcctttgtactcagactgaaactacgccaggttgttgactgtagatcttggcatttcttagcttccgtcattgcatgagcccatttgcccattccttaaaatttttctctctctctttttctcttttgctcattcacttgttcttgctctctttctctctctctctctctcacacacacacacacacacacacacacacacggttctgtttcttggagaaccctgactaaataacagtcatacagcttataatacatttaaacttatgtgtatgtttcagtaagatttcaatttgaatacatatcttcagtcttcagcctcactattgaggaactgaaataggaaaatgttaagtatataaatgccaaaattctagattcattatacattgaacttccaagaaaatgatgcaaagtagaggtaaagaagtttgctaattcataaaacaagatgacattgatgaagcacttaaacatatttatatatttataatatatttctactttaaaccattaaataaagtcattttccctattgaagttgatcggtaaggttttggcagaaacatgagctaagtttgtatgcaaaaacttatgataaactataaacctggaaaattcatgggataataaataagtaggtatacaatggcaaagtaacacattctttgagtatttaccatctggcaaatgctttatgaggttctttatatgaattattttaggaaaagacttggtagggataaggaaaacaaatctgtagtagaaaatactaaataaaaaatgaaagctgacatttaccaagtgctcactacatgccaggcactgttctaaattctttatgtgtactaactcgtttatcctcacaacaggttatgatgatcttattttaaccttacgactgaacaaaatgagacacagagttgttagttaacttgcaaggccgctctctgaaaagaatgtcttggtggagccactctactccattttccctgagaaatcattgctgtgtgctgcccataggggcctgagctgaagctacacattgcctctgaggaaacagtgctttggcagagctactccatctacccattgtagtcactgtgccagagctcaggtagcaccgtacatcccagaaaaatgatgccttggctgcctagagcagtcaccgctgcctgtgcatgagctgaagcagtatcctggcccctgggaaaacagtatcttgaatgcccagagtaggtatgcttccctcctccccatgacaggaaatggtgtcttggcctcctagagtggtaatgtaccctagtacccaagctgaagaggtgccctgtatcccagagaaacagtgctttggtcacccagagcagataccaaacccctcctacccctacagagggcctgaccaatgaagttagttacataatgcctcccagggaactggtgccttggccaagcagagcagctgtacatcccagggcagagctgacatggtaccctgagtcccaaagaaacagtgcagtggatgaactgagacaccctatcctacaggacaagcagttctagtaccctgcttccctggagctggactagccacctagagcatgagatactggaaattctccttcccagggagtagagtcatagctgtgttgctctttgctccccagggcccaagcaatagctacactacaccattctagggtcattgctgccactacacgtggcttcatagagcctgggatactgccaatttttaccatctcagagtccagagtcaccactgcatggtgccttatccccccaggatctaagttgtctctgagccctgttgggtctggttcccaaactgatgcctaccctactccctaggtccaaactttcagagcatttctagggcagaagtgctctgaaggtttgcacctggggagcagggtagactagaacagagtctcagctacaaccaaattcccttggtctgaactgcgagggtgcctcagagtcatgggtgctgcttctgtgggcaatctatatccaacactgtcacagagagtggatctgcacctcaggacccatatgccacagtaggttcatgaggacctgagcctaggacctcagcttcacagctgctctgaataactgcaccctggaacccagcactagtgtggctacttgcaggtcatgtcagacctgacacaaagaaggatctccatggctaagtctccccattgtggggaaaatgaaaataggaagatctaatacacattttccgaccattttatttaacatatgcagaatacacattttttttaatcagcacatgaaacattctcctggatagatcatatgttagatgaaaaaataagttccactaaattcaaaacatcaaactgatatcaagtatcttttctcttcataacacagtaaatttagaaatcaataacaagaactttcaaaactgtacaaatacatggaatttgacaacatgctactgaatgaccaatagattaatgaggaaattaagaagggcattaaaatgtttctggaaacaaatgaaaatgaaccacaacataccaaaacctatgggatatagtaaaaggagtattaagaggcatgtttatagcaataagctctacatccaaaaagtagaaagatttcaaagaaacaacctaatgatgcaactcaagaaactagaaaagcaagaacaaaccaaacccaaaattagaaagaaggagtaaagataaacagaaattaacaggattgagactaaaaaataaaaaagatcaatgaaatggaaagtggattttcttaaaagataagtaaaatcaacaaaccattggctagactaaggaaaaaaaggagaaaagaccaaaataaataaaatcagaaatgaaaaaggacacattacaactgatatcacagaaatacaaagaatcattagagactattatgaacaacagtatgcaaacaacttggaaaacctagaggaaatgggtaaatccctgagaatatagaatctatcaagactgaattaaaaagaaatagaaaacttcagcagaccaataatgatgtgattaaaatcataataaaaagtctcccaccaaagaaaattctaggaccagatggctttactgctgaattctaccaaacttgtaaagaagaaataatgccagttcttctcaaactattaaaaaaattgaagaggagaaaattcttcctgtttccgtgaggccagtattatcctgatatcaaaacctaacaaagatccaacaaaaaagaaaactataggccaatatccctgatattgaacatagatgcaaaaatggcttataaaatactagcaaaccagtattttgaactgaattcaacagcaaataaaaaagattgtatatgattatcaagtgggaattaacctggaatgcaagaatggttcaatataatcaaatcaatatccatgatacatatcaacagaatgaaagacaaaaaccatttgattatctcaatggacacagaaaaagcatttgataaaattcaacacatctgttcataataaaaactctcaacaaattatgtataggaggaacatgcctcaacataataaaagccatgtatgacaaactcacaatcatatatgccatactgaatgtagaaaagctaaattattttaccctaagtactggaagaagacaaagatgtccgttttcatcacttttattcaacatggtactgaaagtcctagctaaagcaattaggcaagagaaagagaaaaagggcatccaaattggaaagaaggaaatgaaattgtttctgtttgctgataacgtattcttatatggagaaaaatctaaagcctccaccaaaaaattcttagaattgatcaacaaattcagcaaagttacagcatatgaaatcagcactcaaaaaatcagtagtgtttctatacaccaacaaagaactagctgaagaagaaatctaggaaagcaatcccatttacaacagctacaaattaatacctaggcataaatttaaccaaggaggtgaaatatttctacaagaaaaactacaaaacattgatgagagaaattgagaaggacacacacacacaaatggaaagatatccatgtttatggattaacacaattaatattgttaaaatgaccatgctattcacaatgatctgcagattgaatgcagttattttcaaaataccaatgacattcatcacagaaatagaaaaaacaattctaaaattcttacaaaactaccaaagaccccaaaaagctaaaacaatcctaagcaaaaagaacaaagccagaggcgtcaaacttcaaaatatactactaaggactaatgacttcaaaatatactatgaagtgctggtaagccaaacagcatggtactggcattaaaacagacacatagactaatggaatagaatagagaacccataagtaaattcatatatttacagccagcagattttaaacagaggcaccaagaacatttattgtagaagtgacagtctcttcaataaatcatgctgggaaaacaggatatccacatgcagaaaaataaaactggacccctatgtttcaccatgtacaaagatcaactcaaaattgactaaagataaatgtaaaatctgaaagtataaaactactagaaggaaacataggggaaacactttaggatattggtctgggcaaagattttacgaatatgacctcaaaagcacaggcaaccgaaacaaaaatagacaaatgggattatatcaaagtaaaaggcttatgtacagcaaaggaaaccatcaacaaagttaaaagacaacttacagaatggagaaaatatttgcaaactattcatccaataagggtttaatatctagaatatatgataaactcaacagcttccaaacaaataatccctttttaaaatgggcaaatgatctgactagacatttctcaaaagaagacatacaaattatcagtaagtatatgagaaaacgcttgacatcgctagtcatcagggtagtgcatatcaaaactatgatgagatgataattcaccacagttagaattactattattaaaaagacaaaaataacaaatactagtgaggatgtgaaggaatgagtacttttataatcttttggtgggaggataaattagcacagctattacaggaaacagtatagaggttcctcaaaaaaactgaaaatagaattgccgtatgatcagcagtctcactactgggtatatctaaaggaaagaagatcagtatattaaagagatatttgcactctcatgtttattgtagtgctaatcaagatatgtccattaacaatagccgagatatggaatcaaccttagtgtacataaacagatgagtggataaagaaaatttggtatatgtgtacaatacaatatgcagccattaaaaaataatgaaatcctggctgagacagtggctcacacctgtaattccagcactttgggaggctgaagcaggtggatcacttgaggccaggagttcaagaccagccaggccaacatggcgaaaccctgtctctactaaaaaaaataaaaaattagtggggtgtggtggcacacgcctgtagtcccaggtactcaggaagctgagacacaagaattggttgaacccaggaggcagaagtttcagtgagccaagattgctccactgcactccagcctgggtgacagagcgagactccatctcaaacaacaacaacaacaacaacaacaacaattcttgtcagtgaaataagccaggcccagaaagataaatactgcatgttttcacttatactcggaagctcaaaaagttgtttttatagaagtagagagtagattagtggttactagggactggaaagggtagatgggataggatagggagtggttggttcatgaatacaaaattaacagttagatagaaggaaaaagttctgttgctttttagcactgtagggtgaatatagctaacaacaatttattgtgtattttcaaataggtagaagagaggatactgaacgttaccaacattaagagttggtaaacatttgaggtgatggatatgctaattaccctgatttgatcattacacatagtatacatgtatcatgtattgaaatagcacattgcaccccataaatatgtacaattattatgcaacaattaaaaactctgataagtataaaggactaatttttcaggagacataattagtgaggttggaataagatttacacagtataaaatttaagactgcctaattcttgcacagtattttatatgaagaaaattaaataaaaataagcttgcttcacatacaattcagtttgaaaacacctgttgtaatagtcattagtttaattaacgttattaacattggacatccatttctaatgagtaaatattaagtaattgacacattaaaaaataagtaatcagtctagcatcttaaatatgtagttgaaatggactcaactatattcttttggtttatagattctttttattttgggaaaagaaccaaaaatttcttttgattttcaaaaaatgctaacataattataataaggcaattataatgaagtattggaggtcttatcaattatttttttcacagataaatttagtgttttaagttggatttggatagtaaacatacaacatctttagatacgtgtttcaaagtatctgtaagctgatatgcctccattctgttctcatttcattattttttaacattaatttattctttcaaaagatatttattgagttatacttatatgccatgcattgtaccaacttttggagatgtagtgatgagcaaagaagatgtagtcactgataattatttaggctccagagtgatatatgctataagggctaaataaacggggctgtgattgtattttacagttcttaaaatgacagtaaaataactgacttaagataactaccaacaaactcaaatatctatctaactaagccaaacttttggaaagcttttctctgctagcatggtattgaatgtatttcctgttatcatatgcttcatgctcctataacatacaaaatgaaagcatttcattagattgtgatcaagttagtctcatgggaaaatttgcctcagtttattgttttgaatgtaaggtggctttatagttagttgtaaatataagagcaagatgaactgtattaaaaattatattgatgtactattagttattgcttttctgaggagaagggaggtgataggccccaaataactgattgctcgtttttccttagcatggttttggaaggaaaagactttgctttttcatgtgacattagtaatattgtaggacttagaaaactgaactcaagatgagatgctgcttatgcactggttaactttaggaattgtgcaaaaagatatattagagctattacacagagaggaaagaatcagtgagtaaatgaaccaggaaagagactggggactagctaaatgtagaggttttcagtgtttgttttgtgattgttctgtatttatcaagccttgctgattttttgtaatgtcagttgaacttctccatgctgcagaattttgttttcccattggcaagatgctctgctgcctcttgatctccaattctctttggttgacatcctgtagtttcctgctggtttactttgatgattctacctacttcattcttagattctctggttatgatcttataaacagtgccactcatgactaaaacgaatgcattctggacaaaataggctttactttctttctgaactgctaataattttcaagcctaaaaatcttcaatcacaacccaaaaagtctatagctacctactgtagctttcaaaaaatctctattatgcaccataggcaactcaatattttcttctaacactaaatttcaagcaattaaatttcctccaatggctgaaaactactagaagtatttcaagttttttttttttaatcactttttctggcatcaaatcttggatgcatcaaatcatagaaagccctttggcagtaagagctgcttccacctgtgaaatctttattctgatttcttaagaggaagattgatttaattgtcaatgttgactaagtaagtggtgaagcttttgtttttggtttggtcatggtgtgcacaatgtctgatccctgtgtccttgaaagtgctcttgtcagtcaagacagcactggagaaggagattaaatggaaaccatttggctgctgtttttggaaagatagcaaggcatgacatgcttatgtgaatacagagcaataaaacacaaactgccttttagaaattttattgtgaagtttgtatttcattttattatctgattttaagaattgaaaagtaaatagcccaaataacagtcttgattttaatatataataaatagtttagttaccatacaattgaagggtattattcaacgtaatcatgaaatatagtttctcttttatggtggcgtgaacctgaaaacttaattattttccccaataaattagcaatttaaagctctttgcctttctaaaatgtcactgcattgcgtaatattgcgcagatgacaaagatagcttgaccatgacgtattaaatgctaaatgttacgtgcagcatgtaaaatacgttctgctttgtaaaattatttgatagagagtcgctgtcattgtttttgtcaatcatttattcatctgttctgtcccaggcttctttttatctagtcattttcaagaaacgctgatgcctgcttctgatctctagtgatttaaattagagtctctgagcatgaaaaggtgctaggccaaggtctaggaaaagaaatcctaaggcaggaatgactctggcttgtttgaggcacagcaagaagatttatagaagatttttgtgaatggaatgggtggggcaggggaggcaggagagaagagagagagagagagaaacaagggccagcttatgtaagatctataggtctgtaagtgttggcggaaactatgaaatgatttttatgcgtggaaatgatgtgatattatttgcataaaaagatcattgtgactttaacatcattacagaaaaaatatggaggacacccttggaaattgcacatttgatgtttgttgtgatttgttaggtgttcacacctaaaccaaattgaggtaattctgtttggcagattaattgtatgagaagaaaactttgttggcggaaaattgacacttatctattcagcttttaatgacctggtttagaaagcagcttaatgcttaccatgcctatgatgtatatggtgacaactatcctgttctaatggagaggaagaagcacatttcttttaataaatgtatgtcatttatattcaatacattttttcttaattcaaagagattttgaacaaaatcttgtttccatcatgattgcctgcttttccaaatttaattctatttcctgcttattgacaaaatgttttttgtaaatactgagatttattgttcctcaattttaaaaagtaaaaattatttcatgacatctttatgaacctgatttaatgtgctaatgactacttgcatgtcatatacttctgcctttcagtcaagagcttagttgtagcagttgacccattttctgaaaataaaattgttaatggtgaaactgtgtctatctcatcatttttctgagcacattacaaacaaaactctggaaatattccatgtaaaagtgtttccttgtgagataaaataaggaattatttggagcttcaaaataaacattaatgtattaaaaatatgaggaataccattataacattgtttaaatatgtttagtcctatggaaccattttgagtgtgtgtgtaaaacacctcatatgtttcatagaactagtgtttttcagaactcatttttggaaatgtttttctacatatattactgacttttatttctgcacgtgatattattgatgatgccttactcacctgcacatgtttataaacaaaacaaaacagtggaagacttgtgattctttttgacactgaacagatgtgaaatttattcccttattagtgcctgcaggacgtacaggtaaacgtgttaaaggtctgttgcttgttcttctaaagtcttaaatttaaatttacaagtaaccccaggttttttcacaaaggagtaactacagtcctcttagccatatgccaagatattagatgtttgtgtttctttaacaagcttctggacattatgggtgtagatcctttccattttttcacttgtaatctgacttagaaggctgatggatcatactggccaagagagtaaaacattgtttgatcctttcaatgcacacagtggcttttcccaccaaatgtgtaacaaccgaaacatttggagatctagcacatcttacttccaaccagtgaaggagaacagaatatggaaagggaaaaagacgcttaataggaggtgggttctaattttttaaaaaagaaaaaaatatgaatcgtaaagaaaggtagatgaagtagctaagtgactggaaagacttcctacagttaatttcctaggagttatggaaatattaaagtttgaaaaatgactacttaatctttattatcttttaaattaacatcattgcctactttttcttatagaaaacacttgtatttttcaagtgtatttgtaagaatttaaagtcataacatctaactgcctttggtaactttgagggttcatttttacacctttgaataattacagtatatctctgtgtgtaatgtttttagtctatagatggttacttggtgtgtggatctgtagatgttatgcaataatttgtagcccttagagtccaatggattggaactagcaaaagcaatggctgtgcatcaagaattaattgactagagtttagtttagatgtttgcagggacctaattatggaggagtgtaaaatttatcttgaaaattccaaggaaacattgaaggatggtagataggtgggtggcagaatcaagatttgcagttataagctatcaatgccagagagcagagcaaggactggggaaaacagtgtaggaatgaatgaagtgttagtccaattttcaaggcaaagggttattaatctctgacactaatggaatgaagacgaaggtatacattttaacactcttttgaaagcaaaatattaggtcggagcaatagtaattgtggtttttgccattgtacataagatttgatgacaatgtagagagttgagtgaaaggaagaaatactgtataacttgaagaactgacatttgcaagttaagaaatttgagagaggagcagctttagcactcatgaaaataagggcttatttctatgtgtctaatttgtggcagctttaagagctaaccagtggcagtagtccctgctgatcatactttatgcgcttgtgttacatcagattttatatattatgttctattaaacttatcagatctaacattgcagctttttaaaaggtaaattaaaatcttcagtttacattcagtgcacttaatgtgtgttattgctactttgtctagcatctagcttatttagaacttgctgacctccctctgtgcttctcaggagaatcatttgctgtaggtaaataattaaataaatccttgtggattcctatctgatcatcttgctcaagcaataggcaatccttttgcaaataagtgcctgcaaatccctgggaaatcccgtttggctttccatgtgggtgtttgcatttctgttatgtggaggatcactgaaaccacttgttgatcctcagggttattgggttacttaataggtgaaaggaggtctgtggagagaattcacagtggaaagtgaagatttttaattccaaacagcatgttcagaatactaccacgctcatggtagtaggctgtcagccttcgcatctgtgtagtaataaagcccaactaatttggaacattctgtctccagggaaggatgaagagggagctataagacagactgtaaccttgaaggagagcagctatggagcattatcattttctctgttcctcttctttctttctctgggagggagatgctagtcatgtaacctatggtttgcggttttttatcaaagaggggagatgagaatctcattctgaatatcatccataatttttgttgatatgctgcagtgtagatcatgggatatgtatgtgtgtgtgtgtgtgtatgtatatatcatatacatatctatatatatgatacatatacatatatacatatatacatgatatatatacatatacatatcatatatacataaatacacatatatacatatatgatccaagtatatatgtatccacaaacacacacacacacatatacacacacacacacacgtatatacacaaatacacacacacacacatatatatgtgtatatatatatatacacacacacacttgggtcaattcattttcattttgacatccaccactggagtggttggataatacttgaaggactttaatcagtgatctaagttctggaggcagctggggcaagatttcaaattgctgtttacatctgtaccagtgggttaattagcacaaaaagtattagaaatagtgtttccctgatgaaacaagtggtgttcatcatatgcagctggctagaaatatggtttggaaatctctgccttgccagctgtgtgctggtatggcagtacacatggtcctatactcctgccctgccatatcttaatggaagatctgtcctaggatcttttcctggattgactgggaaggttaatcttgtaagggatgcaattttatttatcttggagatcaccattcatgtaaggggcttttgtagtgatagactagggacttcacagagcttactggaacagtatgtatgactgtttttgtgcctactggctaatatttgcttatgaggcagaattttgtttgtgctttgttttgctgtgaaatatacctggttgtcaggttggttatgaggaagcataaaattcttgagtgctaccaatatttattagaaggaagctgataattgttgattgaacattggtttggatcttgttgcaagtctactgggaaggaatgtctgcaacattgtctgaggactttagaaagaatgaattaagagagggtaggatgtcaagaaaggcacggtaaagatagtccaggcctgagaagtaagcggactctagttggccctgcaggaatctgcttcctatgttatggaacatacagagattgcctgaaggggtgagacaagggaaacaacactgctcttggaatctctaatgtcagaaaccttgaagtgggcgatatggtatatgcacatttgaaagccatgaatgtgctgcagaaaagagctaaagggatgccatctgggcagacctagagagaacaagtggccagaacattagtaggttagtgtcataccaatgccagggccagataaaatgatgatgggaacaacaatgtccagcagggaaggaaatgatcaagaccacctgtccaacttttctgctcaactgaggggcatccctcaggttatccaactttctgtgacacctccagcagccagagcaggccaaccaagaaaagacagcataggagaagggggtatggggcaaaagaagggcctgtaaaggaggaaaggaaactctaaattagaaattttatgctgaatagtgactgagatttgaaaaacaaaacaaagcaaagcccccaaacaccccataaaaacaaaaaccaagaaacggtttacatgacaaagccactggactaagaataccagaaaggcagaattattttccctagacagattgatgtttatgaagttcatgatgttatgtgcaattcaagagaaaaaaataagctccatgtcacatatctgactattaagtgcacatatttctgtgttaactgcccagtatagcatctattgcatctgaactagctctcttttcttcttccgtcaccttttgattcatttgcatgtctgtctatctacaattacatgggctttttgtattttactttgtagggcgacttccagttactttcttttttttttttttttttttttgagatggagtctcgctctgttgcccaggctggagtgcagtggcgcgatctcggctcacttgcaagctccgcctcccaggttcatgccattctcctgcctcagcctcctgagtagctgggactacaggcgcccgccaccatgcccagctaattttttgtatttttagtagagatggggtttcaccgtgttagccaggatggtctggatcttctgacctcatgatcctcccgactcggcctcccgaagtgctgggattacaggcgtgagccaccttgcctggccccaatttgttaaatccttgcatcttccactcaagaaaatgtggcatatgctccttaacttgtattttgacataacatttcagatactttcctctatattagacaatagatagaagtgcacatatttttatttgttgtagtaacaaatggatgtttttacctttatatgtagttaaatttttgtttatatgtgcagataaatagagcacaaattccttgagggcagaaaatctgtcttgttcatgttgtttcactaccatagagacattatccctgatattcaataaatattggttaaatgaatacatttcagttactggaatgatgtcccactgtttatagtttttctcatatcttagtatttgtctgtgtctgtgtgaactggtcacgatggttaggggagcaggccaggtgctggggatgttgtctcagctgcagggcagacagttgcgttctagtgagtaaatagaagcagcttgatgtccaaggtttcccaagactacctccaggtgctttggaggaaacagattagctccaggagtccccgatggagcaatagggagctttagcttgtgggcatggcacagcaatggagaatcaggtggtatttaatatgtagacacctggggctttaaccagtgttctttttgaagtctaggtctgccatgccagtgaatgggatttatttgtcaagtttcagtttctggagggagggtgtgacaaaagtacattaagattctaggaactcagaaacaggtatcaagatagaaacggttacatactgaagcccaaggagggatgcacaattaggaacgtggttgtctgtggcctcttaacagaatgggtagcttctgagagggaggaggctgcgactctggacccagccatcatcactgtcctgcaacctgtcagaagagtgatcagtatcattaaatgaggaataaaaaagcccagttgatctcttgcctgaagtgttttgactgtaggatgggtgggtgggggttctgattgtgaagcttggaaaataaggacatggtgatgctctgtgagcacacttatatctattagtccacctcatttttttcacccttttcatctctttcttttgtgtctcctttatagcagaaacctttctgctttctatcccttcctcttctttcaatcttctctttctctttttcttcttttgcctttctcccagctgcagggtatgattttgtaagtatggtaaaaattctatacctaatatcttatgatttaggtaaataaaatctaatgcatatgtaagaataatctagaaaaaaggtctggggattttttggtgttgagggatctataaaactgagaaagaatgtgttttttctgcgacattgatggaacctatgaatacatttaatttagactttatggccgagtgtggtggctcatgcctttaatcctggcactttgggggcataggcgggtggatcacttgaggtcgggagttcgagaccagcctgatcaatatggtgaaacctcatctctactaaaaatggaaaaattatctgtatgtggtggcatgcgcctgtagtcccagctacttgggaggctgagacaggagaattgtttgaacccaggaggcagaggttgcagtgaaccgagataacaccactgcactccagcctgggtaacagagcgagactccatctaaaataaataaataaataagtaaatagataaataaaatagactttagttaaaaaaatgttttcagtataacaaagaaaatacagaagccaaagttaagttatgtttgccctactgttcttgtgaagaaagaaaagataaccacagcataggtttatttgttgttattgctttgaattagctatagaacagttatgtataaatgaaaaacatatttccttttttgaaaactacacttttttcagtgacttaagacacataacaaatttatgtggccttttttttcttttcattgggttagtataattctttgagagtgtattaatagatagaatatatatatatgtatatatatatgtgtgtatatatatatatatatatatatatatatatatatatatttgagacagagtctcactctgtcgcccaggctggagtgcagtggtgtgatcttgtctcactgcaacctgcctcctagattcaagcaattctcctttctcagcctcctgagtagctggaactacaggtgcatgccaccacactcagctaatttttgtatttttagtagagatggggtttcaccatattggtgatgctagtctcaaacccctgacctcaggtgatccgcctgcctcggcctcccaaagtggtgggattacaggtgtgagccaccatgcctggctgtaaaaaaaatatttttacagtgttgtatacaatcaaagttttgttcattcatcattttaagacaagttccttgaatggatgttaaggagaccagacagaaaagattatgatagattcttttgattgcaagaaaaaaaaaaactcactcacctcagaaaggctaagtttagagatgaacaagacaggaaccccagccaacatgtccagtctttaagagaacccggggaagatggactgagattcagaattgggacgtaactagtgtggctcttctgagtagattccctctctgccccctagtgacagagttgatcctctgccattgggatgacagctccctctgtcatatttttcttgctgccaccagtactctctttattgtagatgtttctctaccattttctgtctcggtttcttatcacttatacttattattcatgaactctactgctttataacatctgtaaagtatcttattcctctgtgtctttggttttctgctccagctacaaacagactaattctcttcccatcccgctcagagtctagagcctattcttggttcaggtaattcactgttactgttgcattttttttaagagacggaagtctccctctgtcacccacgctggagtgtgatggtgccatcatggctcacgtcagtcttgactccccagactcaagcagtcctccttcttagcgtctcaagtagctgggactacaggtgtgtgccaacacacctggttaatttgttttgtattttttgtagagacagggtcttgctttgttgcccaagctgctgttgctttgcttaggtggaggttttgtgccagatccccacgtaagccttagatgatctagtcttagctcaggtgcctactctcgtatcttcagagggggaaaggcttatgttgattgtcttaaggtagggttattcttccagcaggagaatgggggatgacattcacagatgagatttataggcatggcaggcattttgagagcacacagatggccagtttgagcatagtgagaaattccttgtcacaagtgcactggttggacaatctatggtacctagcacagaaacttgctcttggttgaccttatatttttgtttaccttatttctgttttgagcaaaacaatcaatgaatgagacataactattcctcactgagtttttgagactttctttggatctcattgcatattttatttatgccctcctcatttagttcacaattttccttacaaattaattgtcatttactaactactttatgggttatttcaatccatagatgagacttaaaaacacataaaccacttatactgggaattaaacttacttgataatgttgacgtctgtaagtatttgaggctatttcagttttaaaacataataaagattgcatctcacagtgtagtctctgtcttgaataaattgcttctctgcaaagtaagtccttgagctaacactcaagaaattacacatgtaacattggccaaaagcacagttagcattttttaaatttgaggggggattgtctttaagagaatatactttcaaatgtatgtgttacttccctttaagcatgtgtgtatgtgtgtgtgtgtgatgattgttggtttgatttttggcagggtggagattggtgacctattgataagatttttctcctctctttaacacttttcattctttacccaaactcttcctaaacatctattgagcatttactatttcccaggcacaaagaaaatgatgtaatttttatctaattcagacatacagtaagtccgtggttgctgtatttacaaatcagctggcaagatgtaagtagtttgaatactatggtttccttgattaggctgcagtttttaatcatttgtacaaatggttatattctttcaaatttcatactgtttatgatttttttctgaagcagggtttcttggcaggtattaatagaaaacaataaacatcattatttcatttggcaataaacaattaatagcttagaatggttttctaataaaaacacattctacaatgaatgagagtttttcttttccagcactatcaataaaaacttacagttccctaaaatggtgaaatcaaatgataaatagtacaaaggattttaacatgcaaactagatgtgttatcctccatttgtaagaaggaaataagagagtcgagatttctgagtcctgaccttggctgtggtgctactaactcatctttcaacgttgattttctctttggtaaaagaaggaaagcacaacactgtgtatgggacagagtagttttgaaaataaaatgtcattatatcagtgaaagcatttaaattaaaagaaacttacaaattcatcatgatcagaagcttacctaattagtatagattactatttagaaattaataattaagttaagcaagcatttaataggctgacatctattataacattatgataacaagttattataatttatttacttgtctgtctactctactattagattagaaactcaatttcttcatctgttttcctagtccacaatacaatgcacaacattgagcaggtgtttggtaaatgtgtgttgggtgactacagcaagagaagagataaagatgaatctttacaatatcatagtctgattattatatactactgaacgagctttcagtcaggcttcagagaaagttagatccatttaagaggtagctacatcattgatttttccaatgcctcaaactatgagattggaagacttttgtttctttaatttcacttgttgtcgttgctgtgaatggttacagcaaacacagagaggatgtgcctctggcagtattatcttcattaactgtatcaagttgtcttcactgagataatgtattgtgctgacttgaatataagtgttttcatgaatggcaaattgatgaagactggtttgcccagctgcatctagttctccagaggagttacctcctatggctagtactagtactttctacttactaatagattcagagcattgggaagattcctagttggtcatttacttcttttaactacatacagcttggaaattaaatatcgttagtattacataacctgtttcttatggtgaaatgtctgcgaaagtttacatgcaagtgcactctgacatcacttgttggaaaaaggaaatttggttgtaaattttgccttttcagcatgtcataacttctcctggaatgtgtaatatgacctcatatttgtattgtacttacagttttgaaagtgttttcatacatgaactcctttaaaaatactccaggagagagggaggttaggtattattaacatcattttgcaagtgctctgtagattattttgacctaacatccatgtgacatatctaattgttaaatgaaattagactggacctttttatgttgatatttctgccccttttattcttctggagatctgtgaacaaagaagatacttgctatctacactaagccatatcattgggtcttggaagactgagctcaaatgagataattgcaatcttctctcctcacagataggaaactatcttcaggtatcacagagtaaatgttagataactaaaaaggtcagagatatttttaaagttttgttaggagagaaaaaattcccttctgcgttttatccttctatccaagaataggctgaagagaaagatgtccttagcttgggtaaatagaaaataatccttgtttattataagcattttatatattcatttatatcacagtgtgttttatggagctggggaagggaatgattatatatatatatatttataatgcatggcctctttcttaagtagtcatagtttactgaattctgtttgaagtgggaactaagctctaacagaggaaacatggagaagaacattctagagaggaatcaagtaccttcagtactaatcagatttaaatagtataatacagttgaactaatttaagagaaaagtagcctaatactttctgagggagcaatgaagaaaaatgagcttaataagataaacttttatttatttaatagttgatatttagagatacatttttggttctttatattttggttctttatgatattttgtgatgctgtcctgtataccagcatccagttttcaatactgaaattgtagacccaggcatctgatatatcttaagtttcttataaaataaggttggatttacttttccagttccataaacattgatagttcaagtgtctatagtttttttattttttttgacaggccactgagatatcacatagtagatgtcgaatccttaggcagtgaaaaggtatcaaagcagataattactctagaaacttatttgaccagttattaagacacaaatgatttacttagctattgtctttgggaagagcttcaaagacataagaaaataccttattagagtagaattgaattggaataatactattaagcttccagtgatttcttcatttgcttgcggtgtaaaatatgttattaattcatttggaatgaagagagatcatttggtctttgtgtaattattaaattaggaagtgctcaatatcacctgtaacatatcacatttatgaaattgttcatatctcttctaaatctgtttatttacagttttaaaaattggtctcctctactatcttcaaaagaagtgaagatgtaattaatagaatatcacaacctaaatttgatgaaaaactatgtgacatcatttcttaagcaaacataaaaattttaaagtatataaacatacttgaagtatatataattcttaaaatctactgaaggctcatctgaaattccatgtcccttttttgcttctaacaataacaaatgtctttaaaacaccaaaagagtatctgtatcattttatagaaaacttttatttccttcaaagaatcaatcattttggttcattattatttgctaatattagctcaatttgggagaagccatagaaaaattcagtaaaatgcatagtatacattagtaaataatacatacattcaagagtaattattttgttgtacttggcagacaaccaattaaaactcagttaagccaaagaatatgcattggttactatagtagaaagttctagagtggtccttcaggcctgactgaatccaggcagttagatatttatttctctctcatagctttgttatccactgaattatattttaaggcaagaaacatgaggtcaaaatagccaccaggttttcagtcctccagttcgttaattcaagttgaaagggattgtttctttgtagttttttaaaaagggtgctgattgtattttctttattttaacttattccacattcccactcataagtgaataattactattaggatcatggtactgccattgaccagtcctggaactacagctagggtcacccttagccaaacataactaccaggaaagaggaaaaaaaaaaaaagtctgcaaaggaaattcagggtgctattaccagaatattttggtggaggggagggtgttgggtggtgacaggaaagcatagtgtatgtataaacaagttaaatgcagggtgcagggtgaaatgcacactgttatgtgaaaatgctactgagcaaaagagcaacagtttaaatggtaaaataacatttggtattagaataacataaagaacaatcacaaaacattgatattgaaaatgttcgattgctgaagaagggccttcaggcataaccaatcatcatataaaatattggtgatgtctgcatctctgagactgtttcctcatctgtgaaacaattattattatatggctaacagcagacaaatttgtatatgtttttgtgcttgattatattggtacagaaggtattccagattttaccgagcagtgtatgtataatttgagtgaaattatatccaattatggtgatactacaattaatgtagaatacagacaagtattagtaaagctcccgaccgctgcatcctgcaactgtgggaaattggaagactgaataatagctcactgaaatttgcctttaaatatattgcacactctatggatattaacatgaacaaaattaaactccacaggactggaaaaattaaactaatgactttttatgtaatccaagttaatgaatgctttctggcccaacttttcgttaggaaatcaaccacagtttcctgatttccttcattccagcagcttccattgtgtgactgtttacaaaagtgcttaataagaactcttaatgaagacttgctctcttttcattaatactgaaatgtatttacatagttttacagcttttaggagtaacaggtagtcttaaaaattaatagtggcttttagaatagatgttgtataaatattttctttaatcatctgaatatttctaatgtattaaaatactatagtaaagaatagagaatcacaatttcatcttctaaatgaaagaaggaaggcaggggcttaaaatatggggaatatttggaaaaaattctgtttctattgatcttggtgctgaaatccatattcgcagggttttacagatatgttcactcccctgtatcctcaggggattgattccagggccaccagcagataccaaaatctgtgcatactcaagtaaggctgcagtagccatgcggaacccgtatatatgaaaagccagccctccatatccacgttttacattctgtgaataccagtactttccatttgagtttgatttcagatgcaaaccctgtgggtatggagggccaagtgtatttattaaaaaaaaaatctacctggaggtggaccgacccatgcagtccaacctgtgttgtttaagggttaactgtattcctagtgttaaatgataaactaaatgcaaagatgattaatccccaaaattaaatgtaattaaatctataaaacacactagacaaatacaattttaatcattaattaaatacacttttaaaaacacctgtgataatgacttacttgctttaatgcctttgtatcaattcatagctaaggtcttaacgtaagatttagcaatttaaattacgttattttatggacaaaatatataataatgacattaagggaaaataaactgtaaggcaacctttcctaatctaatgatggaattgagtgaacagttggttacctgtaagaagagcaaccaagttaaaagaataaaacgttcaaaggccataagccataaggtttttatgaaaacctcagaaaacctcattgaaatgccatgaaattaaaaagcacaccaaaaggaaaataaaagttataaaataagcattcaataaacatataaacttatacttcacttgcagttaaagaagtacacattttagaaaaagggataaaatttgccaaattgtcaaagattaaaaagataattgctgggaagtgtggtttaaattcagcattgtcatatgctattggtggaagtctatgttgacatatctttccagaaaataacctgatgatgtgcattaaaatactaaaaagatcaaatactttttgacaggaatttcacttttatgaagccacaagaaataaataatttgggccgggcgcagtggctcatgcctgtaatcccagcacttttggaagttgaggctgacagatcatgaggtcaggatttcgagaccagcctgcccaacatagtgaaagcccatctctactaaaaatacaaaaattagctgggcgtggtggcacatgcctgtagtcccagctacttgggaggctgaggcaggagaattgcttgaacctgggaggcggaggttgtggtgagccgagattgcaccactgcactccatcctgggcaacagagcgagactccatctcaaaaaaaaaaaaagaaagaatttgagatgagcacaacaaatatttatgtacaaagatatgtactatggttttatttacagtgtgaaagatatggaacttttaaacacaccaacggaaataataattactgtatattgctgagtttttatgtgtcgggctatatgattagtgctgtgtatagattatctcatttatgtctaagttcacattaatatgcagttagcatttatttctaaatttacctaccactatgtttataatagacaagatttttctcagtggaactcacctttcatcacgtgtggaagctgtatgacttaggagaattggccatatttgtatctccaggaatactgcctgattgtcttaagccagtcagtgattctgcacccctaccaattggttagcaatgtgcttatcacttcattggctcagataagaatgaatacccaaactttcgattagggattgagctagaaattatcttctccccttagttcttagttatgtaaatggcacaataaaaatcgagaataggaaatttatcaataagaaaaaattgtgcagaaagctaactgggcaaaagctaatgctacgtaaaagaaatgcaaatcaaaaacaatatatacgccaattttcctattgtaattcaattttcctattgaattaaaataaatttttaaaaccctgatatatatgaacagtataggaagattggggtgaggtttgcatactttttcacttctctgggagtgtaatttgccctattttccagacaaagtattgtaattatatacagactttgatccggtaatttccattctcccttgtctcaatagtcagatgtttaagcagtgatttatataacagataaaatatatacatagaatatatcattcaatactttaagtgtttcacaaactttgtaatcgtttatttctcaaagcaacagtgtgttagattatatggatgaggagactaaggcatatcctgtcaaggcaacatagttttggaatcaggcttataacactttccaggccagctacagtcattttagtcactacgctactttgcttcaattctactcatcacagtgtctctatatagaaaaaaaaaaaaaaaagaaaaaatcttaaatgtggaacattacaatgggcaaaaaaaattataaggtggcatgttacgccaatagtatttatttgaagacttatttaatgatataagaatatgattgcactgtaggtgacaaaaggtaggaaatgaaattgtacgttgtctttgtattgctataaaggaatacctgaggctaggtaatttataaagaaaagacgtttatttggctcatggttctgcaagctatatacgacacatggtgccaccatctgcttctggtgaggactttaggctgtttaaactcgtggcagaaattgaagtggagcctgcatgagcagagatggtatggcaagagaagaggcaaaagagagaggggagggaggtgccaggctctttttaacaaacagctcttacaagggactaacagagcaagaactcactcattaccaccaggatggcaccaagccattcatgagggatctgcccccatgacccaaatacctctcactaagtcccacgtttaacattggggatcacatttcaacatgaggtttggagggtgaaatagctgaattattgcatatgtatagtacaatttcagttttagaaaaagactgggtagaaggtgtctaaatattatcttttagtttatcttaatatagatgatttttattttcctttataattttctaattttctaagtgttttgttcatacacacactcacactatatatactgaaaaatataataaccaaacgtttcaaggaaagtgacttgtgttttccactaatttcagcaaaaagagtgaatgacttgataatttttctcctactttttctaatcagaaaaatttcctgcccttgagagcttcaaagcactgcagaaagtttaacagcacatgcaatggaaagcatggattgaatttgattttaaattgataaatttaaaattcttatgtgttctgaagagtttgtcatgtctcatccgctatcgcttttttcattaccatactgaaagctgagggtatggaactcagaatgcatttggaagaataaaaggtgatatgaattcttggtcttatctgatttcctggaatagaaaaacccaggattaaagctatctttgtctggttctattcctatataaattaaattataaagatcttttcagttttacatcttataaatatgaatgctttgagtctattttgcattagcatctaacaaatatacacacatttccaagaagtaatttgcttgtctcatcccctccctttcatgtctcttcagagccgccttggcaatatgatcttcctaaatacatatctaaaacacgtatcttactgtactgcttccctgtttaatcatacttccatcacctttagggtaaaatacaaatgttataacatggcagtcaggagccttcctgatgtagcctcatcttattactaaagttttatacaaaagagtttcctataaatattctattttaaaataaaatattctaactaatagcctatccttgaagatggcgtgttcgttcttattcctgtgcccttgcttatggtgtttcctttgccatccgtggctttccccaccatcctcactggacagcttctgtgaactgaaggttaatgagtcttatctctttgaggaagacttttctgcagcacctagccttgccttgaacatagtccttatcacactgatgcatgcaaaggagtatacagacttattttcctctcactagtaactaaacaattgggcattcaatagctgtccagtgaatattggtttaatgaagaaaattacttttctaattttattttccttagagtgtaggggtataggtatgactatttgcatgtcatttccttagtgagatgactagaatacataggaagtgattgctccaagctacttaggacaatcatcctaatatcaccttctttgtaccttttgcttggaacatggggtgaaaacatttgagaaggtgtcttaaaggcatactaaggcatgtgtactttgtgcattggtgatgtggccaaattacttgttagagaaattacgactggctagggatggataggtggggagtgtaaactgggagggaaaacaaactggagattgttgtattaagcagaattgaatttatttaactgcatgtaggtggtaagggaaaaaagagtgattaatcatgccagatttcaggtgtgagcaatcagtggggattgaacgtttacttacttaaagtcacaggacaaacaagaaaaaaatagaaaagaaaatcagggccaagatcttattttatatattttgaatttaggagcttatagaggataagaaagaaatatccaggaaaactcctaaaacattttgcaaattagattaaatactgttaaattattggacttaggtaaaaaagagaataatgattttgaaaatattttaagatcatgataatggtggtctgtatttcatatgatgacaagtagaaatacaagttggcctgacttctctgttttgcttggtttattgcatatagaatatttaagatttacctgttacattaacaaattgaagcattttgtcatattgcagcattaataatgtttttcttaaatggtactgttggggataaaggaagttttagtaaagaaatagttggtttcatttaatttcatatacgtcttcaaattgtgtgaaaatatataataaatggtggcaaaacagtatcaaattgagcatattatgttcatactaaaattttaagaagcatttgaattggaaatcaggattttatattttaaaataaaaatatgttcaaaagagcagcccctaagccagtctgagttttgcaagaatattcaaagtgctctttctatgaaaaatctaatcatatcagacatagaataatagatcccatttggaaaatatgtcatttcctgcaagaagaaaggcagaagtaggcataagttagttcttattttttgatatgtgtatttttgtgctcttctttattctgtcacattgcataaaatattctagtttgaaaagtatttcctgcagtatgactgggtttcagtcaacgtaagataaaaataaaggctacggggatgttaaattgaattgaccatttcaaggataatattttcttttattaaattttggaattagatcaattgaagagttttattaacaattatttatcttgattaaattgaattgaccattttaaggaaaatattttcttttataaaatttggaatgaaatgtattgaatagttttgataacaattatttatctcgaattatttctctctaatttctgttcataagatcaatagttgtcaaaagaaaaatggaaaaactatatcatcctaaaaaagaactaattttgttcttccttttctctcctctcatttaagaccaacaaacaagaaaaacatgatctgataaaagactgtggaaattatgacatggttttatagtttaccttttaactatgtgtcatgcttgaaatttcctgtccaggataaacacatctatttttagagctggaagtatgtgatgatacaacccttacattttacagcaaggtgaaatgaattgtgtcattcatacatgctaagatccagtgaatgctaagaaaataacatacgatttaataaataatagtgttactgagtaagcaaacattatttttcactaaaattataaaatataaatatatggccttaaaatatactgtgctaatattttaattcaaaatttaaaattgttgctttttgtagtagatgctgttgatgatcagcctataacctctcttttagtgctgtagttcagactggcaaaatttctaatgcttatcctgcatttctctacctaagggattctttggccacaagagaccactttgccaaccaaataggctgaaagttccagggaattaatgcccctgggagcaaccctcagctaatgactaatgaggattggtgtataaatatgctagctctcattcttacagtgagatatatctgaggggtgtatttcacagtggatgtctgattttccccagccagattaagctgcagttgccagtagtgttacaggcctgataatgatctctgtgttggtaggaggtcttccactccgggtctcacttctttcttttcatccctgctaatatttcctgggatcatctcccaaataaacttctcgcattgaagttattattacctcagtgtttgcctctggggcaacctaaactgagattctttctttctctctaaagtcatgttagaatatgaaaaagaagctgggcgcggtagctcacacctgtaatccacccagcactttgggaggccaaagcgggcagatcacctgaggtcaggggttcgagaccagtctggccaacatggcgaaaccccctctctactaaaaatacaaaaattagccgggcatgatgccacacagttgtattcccagctactcgggaggctgagacagaagaaaacaaatacattgaacaaataggtcaataggcttctgaagaatattgtggctaagctggaaaacgatggctttcaaagtattcagatggcttagattgaaacacagaggaagagataaaataatatttgagatctatctaagaaagtcaaaaatatagatatggcatcatcaatgtctgtatcaaggggtttgtatcaaagttatgacgggaagcagggcacaagacttagatatgtttctccattcttccccctccctcaaaaagatcaggtctttttagtgttttggcaaaagatactatgctgtgaattctggtactatttgaacttatgtcagcggtacattcgaaataatataattaaaggaagacataatttgtgctgttgtgtctacccagaaagaatttttgttttgtttgttggaataaaaatagaaaagtcttaaccaattaacatatctcttctagttatagcatgattatgaatagaaggataagctatctaaatgccttgccgtaagagtcaaagtagaatgaaaatgaaagtaaatcagtgccttctaaaattcagtttcaccttcttaatcatcatgaacagggtatgtgcttggttagtccaaataaatcatatgtgaaagagatagttggggctacttcttgttcaagggggaaaggcatatattgttaaagaactatcaccaggctttaatagtaacatatctgtgagttaaaacatttaacacatcatctacaaatcttgctattttccattacctaggtatcagtaataatgttttccaaatatttacatattttatcattatttccctattatttggtaactttcttgaacatttgcaagaagcataattggaattttaaaagatatgctggacttctaaattaaaataaacagaaatgtaattattgattaattctaagtccaattatatttttctttttagttatttatgattccatctgatatacataggagagaaactgatagaagaattctgatggcaactgtatgatagaagctatataaagtcaagtgtccattttctttcaactatatttgagcatacccaggtaagaataaatgattgtttatacattttccattatttccaaaaaggacttgaaattataaaaatgcttttattatgtgttgaatgtttaaaaatatagtcttttgttgtaaaaaatagtaaaattcataaaagtaaaataaaattaaaagcactgatgagccttttttctgaaaataacttctgtcatcattttgttctatataattttatttttgttttgttggatttttcctttaagcaaagttacaatgatagtattatatttagttgattttcatgcaactgataaagacatactcatgactgggaaatttacaagagaaagacgtttaatggacttacagttctacatggctggggaggtctcataatcatggaggaaggtgaaaggcacgtctcacacagcagcaggcaagagaagagagcttgtgcagggaaacgcctgtttttaaaaccatcagattttgtgagacccactcactatcatgagaacagcacaggaaagactcgcccccatgattcaatcacctcccaccaggttcctgccacaacatgtgggaattgtgggaggtacaaatcaagataagatttggttggggacacagccaaaccttatcattccatccctggcccctctcaaatctcatgtcctcacatttcaaaaccaaacatgccttcccaacaatcccccaaagtcttaactcatttcagcgtcaactcaaaagtccacaatccagagtctcattagagacaaggcaggtcctttctgcctatgagcttgtaaaatcaaaagcaagttagttacttcctagataaaatagggtacaggaattgggtagatacagccattccaaatgggagaaattggccaatgcaaaggggctacaggccccacgctgttccaaaatccagtggggcagtcaaatcttaaagctccaaaatgatctcctttgatgctatgtctcacatccagatcacgctgatgtaagaggtgagttcccatggtcttgggcagctgcgcctctgtggctttgcagggtatagctgccctcctggctgctttcatgggctgacattgagtgtctgagtcttttccaggtgcagggtgcaagttgttggtggatctaccattctagggtctggaggatggtggccctcttctcacagctccactaagtggtgccccagtagggactctgtgtgggggctctgaccccacatttgccttccacactgccctaggagaggttctccatgaggaccctactcctgcagcaaacttctgcctggacatccaggcatttccatacatcttctgaaatctaggcagaggttcccaaacctcaattcttgacttctgggcatccacaggctcaataccatgtggaagctgccaagacttggggcttgcaccctctaaagcaacagccaagccatgccttggccacttttagtcatggctggagcagctgggatgcaggcccatcaagtccctagacttcgtaaagcagagggaccctgggccaggaaatcattttttcctcctaaacctccggggttgccatgaagacctctggcatgccctggagacatttttccccattatcttgatgattaacatttggctccttgttacttatgcaaatttatgcagctagcttgaatttctcctcagaaaacgggattttcttttctattgcattgtcagactgcaaattttctgaacttgtatgctctgcttcccttataaaactgaatgtctttaacagcacccaagtcacatcttgaatgctttgctgcttagacattccttcctccagatacccgaaatcacctctctcaagttcaaagttccacaaatctctagggcaggagcaaaatgccgccagtctctttcctaaaacataacaagagtcaccttggctccagttcccaacaagttcctcatctctgtctgagaccacctcagcctggatgtcattgtccatatcattatcagcattttggtcaaagccattcaacaagtctttagggagttccaaactttcccacattctcctgtgttcttctgagccctccaaactgtttcagcctctgcctgttaaccagttcctaagttgcttctacatctttaggtatcttttcagcagcatccaactcctggtaccaatttactgtatgagtctgttttcacactgctgatgacgacatacccaagactgggcaatctacaaaagaaagcagtttaatggacttacagttccatgtggctggggagacctcacaaccatggaagaaggtgaaaggcacatctcacacagcagcagacaagagaagagggcttgtgtaggaaaactcccatttttaaaaccatcagatcttgtgatggttttaaacccactcactatcatgagaacagcgtaggaaagacccacctccatggttcaatcaccttccacaaggtttctcccatgatgtgtgggaattgtgggaattacaattcaaggtgaaatttgggtggggatacagccaaaccatatcaattatatatatactttgttgattttctttattattgtgtaacaaatttgttttcttctgttctttgagaatatgaattagtgttttgtattttctattatatctgttaatatataatatgttttaaaatatttttattttgtatttattattcagtcaatattcttatagataaattgatatgtacatcacttggtttgcattagtagcattactagaattggtatcactggctcaatgactgtgatcttttaaaggctttttattgttattgctgagtttaccggtagaaggtagtaacaagttaaagttttcattagccagttttgaaaatattgaatcactgattagtgttttctcattcaaataattttcctaatgaaacccagtttaagttgaaaaaaatgaaaattaaattaaaattttaaattttggttgcaggcagtagcaatttctttctcacatctattcagcaatatattcccttacataactaagcctagaggaaaagtgaatgttatatggccgagtgtggtggctcatgcctgtaatcctgcactttgggaggccaagtcggtggattaactgaggtcaggaggtcaagaccagcctggccaacatgatgaaaccccgtctctactaaaaatacaaaaattatctgggtgtggtggcaagtgcctgtaatcccagttacttgagaggctgaggcaggagatccccttgaacccaggaagcagagtttgcagtgagccgaggttgcaccactgcactccagcctgggcaataagagtgagactccatctaaaaaaaaaaataaagaaaagtgtatattatatatgtataatcttccacattgtttaaaaatacaccatttagaaataatatcaagtatacatttatctaattaatatttattgaaaacttatacttatcaagcactgtgattagcaatggcagtgaggatggtaaacattagagaagggaaggcacataaatagttccttgtcacctctaactttcaataaaatatggcaagataagaaatacgttttggtttcttatgtttaagtaggctgtattaagtgacaagaaagaagtaaaataatagggcagtttgtaatggtaacactttcagcttgggaattgaggaacactttcacaaacaaaagaccacttgagttgtgctttttaaggtagagaggaacactgacaggcaaacatttaaatggagagtcaacttggagcaaaggtactgggctggcaaaccatagggatgggatgttcaggaaattggaaagagagattagatatagcagagtagttggaagtgtgttctgtgatttggattcttataactaggcatttgtgtctcattattatatggagaggaacaattgcaggggagccagatgaaccatgctatcctttaagaagttttttttttaaatttttttgttattattatactttaagttttagggtacatgtgcacaatgtgcaggttagttacatatgtatacatgtgccatgctggtgtgctgcacccgttaactcgtcatttagcattaggtatatctcctaatgctatccctcccgcctccccccaccccacaacagtccccagagtgtgatgttccccttcctgtgtccctgtgttctcattgttcaattcccatctatgagtgagaacatgcggtgtttggtttttttgtccttgcgatagtttactgagaatgatgatttccaatttcatccatgtccctacaaagccacattttcttaatccagtctatccctttaagaagtttaatctaggccaactgcattggctcatgcctgtaattccagcactttgggagactgaggcaggtggatcgcttgaggacaggagttcaagaccatcctggaaaacatagtgagagcccatctctaccaaaaaaaaaaaaaaaaagtagaaaaacttagccagacaggatggtgtatacttgtagtcccagctccttgagaggctgaagtgggaggatcacttgagtccaggaggtgaaggtcacagtgagacgtgatcacaccactgccctccagcctgggtgacagaccaaaactctgtctcaaaaaatcaaaaaaaacaaaaaacaaaaagaagtttaatttaaaagtgatatgtgtgttagactaatgaagagagagcagctcaaaggaaggcagattagtttgcaggcttttccttacattttgatcactatttgctgaacccttgccgctcgccaggcactaagctaggaactgtaggaaaataaaacgatgaagacataatctctacccttgaggagtttataatgtagcagatgtacctgtatgacaaacaaatgaatagaatacaccatgaaagcacaagagaatcatgtttaagtaaagactagtgagtaataattatgttggcatgcagatactgagttaccagtagcctaggtttccccaaaaacattaagtctgatcaaggttgcccaagaggcaatgtttctaaatttttaaataattcaggaagaaacaatagaagctttgtctagggcgaaaaaaatgtaaataaaaaagaaagtgtggtagatgagacttggtagtagtagaagcagttaagcggggattaaagaaacaggccttttgtttaggcaagaggggcatgttgatgacaggcacagaaatggggaaaacagagtaaaagcgggttttgttattgttggtaaaatttgtttggctttgaacactgaagaattttctctcctgcttcactttcctgtgttcaaacctttgctagagcactcataacattttaaaatttcattgcaattccttattgagaattgaggaatattattgaggattaattaaggattcatttatttattactaaaaattatttccatcctttaaaaataaaagtataatagagtaatttacaccaaacaaaacaaaaatataaataaaagacctgatttcattcattaccacaatgtatataatttagccttacactttccagcagtcacaaaaatggatatatgttctttctctaaaagctgagataaatgtattatgagtcttagtgtaatggataggaaaagtgtccttacctcctagaggtaccttatatattaaattgttaaaaaataaagggaattaattctttaaaaaaatttcagtaggtcttggggtatcagcggtttttagttacatggataaattgtacagtggtgaagtctgagatttttgcacacttgtcacctgagtagtgtgcattgtacccaatatgtagttttttattcctcacccagttcccaccctccccattctggatgtagctatccagagtctccaaagtctcttataccactctgtatgcctttgcatacccatagcttagccaagcgagaacatgtgggatttgtttcttttattcctgagttatttcacttggaataatggccttgagctccatccaagttgctgcaaaagacattatttcatccttttttttttttaaatggctgagtagcatttcatggtgtacatatagcacgttttctttactcattggtccatgggcacttaagttgcttccatatctttgcctttgtgaattgtgctgcaaaaaacatacgcatgcaggtgtctttttgttatgacttcttctactttgggtagatacccagtagtggaatggctggatcaaatgttagatctacttttagttccttaagaaatgttcatgctgtattccatagatattgtactgatttacattcccatcagcagtgtatgtgctctgtttttgccacttccacgccaaatctattattgtcttttgactttttaataatagctattcttgcagggcatctcattgtggttttaattggcatcgtcctgatgattagtgatgttgagcattttttcaaatgtttgttgggtatttgtttatctgcttttgagaaatatctatttatgtcatttgtccacttttagatgggattatttgtttttttcttgctgatttatttaagtaccttgtggattttggatatttgtccattgtcggatgcatagtttgcaaatattttctcccattctatgtgttgtctgtttattctgttgattatttcttttgctgtatggaagattcttagtttaattaggtcccatttatttatatttgtttttgttgcatttgcttttgtggtcttagtcataaattctttgcctaggctgaagttcagaagagtttttcctgggttatcttctaggttttttatggtttcaggtcttagatttaaggatttgacccatcttgagttgtttttttaaaataagatgagagatagggatccagtttcactcttctacatgtagctatccagttttcccagaaccatttattaagtagggtgtcctttccccaagttatgtttatatatgctttgtcaaagatcagttggttataagtatttgactctatttctgtcttctctattatggtccattggtctatgtgtttacttttatgccagtaccatgctgttttggtaactgtaaacatataatataattgaaaatgtaatgcctctagatttgttcttttgcttaggattgctttggctgtttgagcactttttttcatttcatatgaatttcaggattttttttctaattctgtgaaaatgatgttgctattttgatggaattgcattgaatctgtaaattgccttggacagtatggtcattttcacattatttattcttccaatccatgagcatggaatgtgtttccatttgttggggtcatgtatgatttctttcagcagtgttttttagttctctttgtagagatctttcacatccttggttaagtatattcctaggtattttattttaatttttgcagctattgtaaaagagactgagttcttgatttgattctcaatgtggttgttgttggcatatagcagtgctactgatttgtgtaaactgattttgtaacctgagactttactgaatttgtttatcaaatctaggagtcttttggagaagtcttcatggttttctatgtatacaattacatcatcagtgaatagtgatggtttgacttcctgttttccaatttggatgcccattatttgtttatcttgccttattgctctggttaggacttccagtactatattgaatagaagtgctgaaaatgggcatccttttctcattgaggttctcaggggaaatgctttaaactcttccccattcagtatgatttggctgtgagtttgtgttatatggcttttattattttgaggtatgtaccttctatgcctagttttttgagggtttttaccataaaggaaaactggactttactgaatgctttttctgtatctattgagatgttcatatggtttttgtttttaattctctttaggtgatgtgtgttgcattattgacttgtgtatgttaaaccattcctgcttcactgggagaaaacccactagatcatgctgtattatttttttgatgtgctgttgcatttggttagctaatattctattgaggatttttgcatctatgttcatcagggatactggtctattgttttcttgttttattatgtcctttcctcactttggtatcagggtgatactggcttcatataatgaattagggaggattacctctttctcaatcttttcactaagattggtatcaattgttttttgaatgtctgatagaactcagctgtgaatgcacctggccctgggcttttattgttggcagtttttgtttgttatgaattcaatttcactgctttttattggtttgttcagggtttttatttcttcttgatttaatctagaagagttgtatgttttcaggaatttgtccattttctctagacttcctagtttgtgtgcatagaggtgttcatagtagtctcaaatgatcttttgtatttcagtgttgttggttataatgtcccattttcatttttaatttagcttatttgaaatgtttctcttctttgttaatctagctaatggtctatctagtttgtttatcttttcagagaaccagctttttgtttcatttatcatttgtattgttttcttaaatttcatttagttctgctctgatcctcattattccttatcttctgctagttttgagtttggtttgttcttgtttctctatttccttgagatgtgacattaggttgtcaatttgtgatctttcagatttttgatgtaggcatttagcaatataaattttgcttttagcattgcttttgcttcagagattttgtaacttatgtcgctattatgcttcatttcaaagatttttgaaatttccatcttgatcttgttattaactcaaaaatcattcaggagcagattgtttaatttccatgtatttgtataattttgagagttccttttaaaggtgatttctagctttattctcctgtgatctgagaagttgatatgattgtgattattttaaatttattaagaattgttctgtggcctaccatatggtttatcttggagaatgtttcatgagctgatgagaagactatattctgtgttttttggatagaatgttctgtaaatatctgttaggtcagtttgttctagagtatagcttaagtccattttttttttgtctttctgtcttgatgatttatctagtgctgtcagtgccacgttgaagtccccccgcgattactatgttgctacccatctcatttcttaggtttagtagtaagtatttttaaaatctgggatctctagagttagatgcatataaatttaagattgtaatatctttttgctagactgatttttttattattatgtaatgaccttctttttttattctttctgctttaaagtatgtttatctgatgtaagaataactactcctgcttgattttggttcccatttgcataaaatgtctttatccatccttttatcctgagtttatatgagtctttatgtgttaggtgagtctcttgaaaacagcagatatttggtttgtgattttttattcattctaccagcttgtgtcttttaagtggaacattaaggccatttatgttcaatgttaatattgagatgtgaagtaccgttccagttattatgttgatcattacctagatactttgttttcttctttgttattgttttttaagcaccttgagttttatgctttcaagagattctgttttgatgcatattcaccttctcttttaagatttagaaacccttttagcatttcttgtagggcagctctggttcataatttatgaaatttagttttactggatacaaaattattggctgacagttattctgtttaaggaggtatagataggaaccagtccctcctgcctggtaaggtttttgctgagaagtctgctgtcagtttgacaggctttcctttataagttacctgatgcttttgtctcactgctcttagaattctttttttaaacattggctttagatagcctgatatgtgtatgccttggtcatgtcctttttgcaataaatctcccaggagttctttgatcttcttatatttagatatctaaatctctggcaaggccaggaaagtttttttcaattattcactcaaaataagttttccaagctttttgctttctcttctcccttaggaacaccagttattcttaggtttgatcattttatgtaatcccatatttcttacagacattattcatttcttctgtttattttttctttatttttgtctgattgggttaattcaaaagctttgtctttgagctctgaaattctgtcttctagttggtttagtctattattaaaactttcctctgcattttgtacttccctaaatgtgtctttcatttccagactttcaggttgggttttctttaaaatatctttctctttagaaaaattttcattcatatcctgaatttaaaaaaaaattaagttagttttcacctttctcttgtatctccttgagtagcttaattatcaacattttgaattttttatttggtatttcaaaaatttcatcttggtttggacccatttctggagagctactgtgatttttatagttgggggtattatagaaccctgttttgtcatattgccagaattatttttctggtttgttctcatttgggcagattatttcttctgttattctttaatttgtttttgatttgactttttaaaaaaaattccttttgtctccattaaggatgtgactttaatgtttatactttatggtaacctaatgcagctcttggtgcttccaggggtgaagtctctgtatgagttccttggttatagagggtgtttgtatgatggctttctcaaatgctggttgttgcagtgtgcttgatgtgtgaagaagttcactctctcctctggggttggaatggcaaaggcctcttgaagcttatctcattcccctgtgctgtgaacatttttatgtatttattttttccacagtattttatttactgtgttgaatagttccagcttcaggccggtagagaaggtttccctgggtagaaactgggtgtggctaaagcaggtggataaatgcaatatccagtagtggacagaggtcccagccttgacagaggcaggtggagaaactctcagtgcaacacactgaggtcttatcagggggaacagtcggaggcacctgaactcccctgtcaggccagcaggaaagcagtccacctcctagttacactactgactcagtattttggctattcagatcagaccagcacaagttttcatctgcacaaatgtgcatattccaagtagagtggaattctaacacttgtgcaagcacgaacctggcgtgcactccacctgtggggatataatccccttgaattgttccagaaaggctgtcctttggtgtactcatactgacctcccatggaagaagccccagctgggtctgcagtgctggacaaggggcaaaacaagtcctcttctccaagacccttcatgagcaccagggctgcctgactgttggcatggagcttcagattttccccactgagcctggcagtgcatttgtgcctttgctgaaaggagcttcccatcagcagaaagttctgggattcaagttctgccatccagatttttttgtcccatgaggtgttcccttgatatagtgcacttctcattctgctagaagtagtatctctaaagacaagactatagtgaatgctgctgctcctctgagtctagccacccaatggggctgccacactctaggttggtggtggggatattttcaagggatccagtgttgtgacctattctgaggtcttccagaagcaggtactagtgccagctctggtgggggtagcaggggggtaacatagcctctgtgagatttattgattataaatagccttagtgtgttggctttctcaaatgccagttgtagtagtaatgaactggtcacatggacagactcaggacctcatgattagccagggtgttgcaggcaacagtgacagctgaggtcagacacaagtttttccatccttggtgctgtgttattctgcctgcagatgctataatggactgtgtcagttggcctccagccaggaggtggcgcttgcagaagagtgctggatgctgtagaagtggtgggatttgtgctctttttatgctacccaggggaagtactctggtttcttaggcaattggtggggtcatagaactgccaaaatttctgtctttcatgttaagctaccagaacagccggaggggcaaagccaggtgggggctgggtgggaaagatccgagctgtggttccccacatgtgggacaaacaagggctcctgtgagggcccaggggcggttctttggctactggagtaatgtttcagagaggagcacagctgcctcagctgtacagaagagtccatatgcggagcggggagtaacaggtggcagtatgttccactcagctccccacactggctaaagcaggtctcacatctgcagtgttccactagcagcagcaagctaagttccaggtagtttgcattcagaacttaaaactgcccgaggccataagcctgcctggtggagacagcaaccatggctttcaggccacagccgtcccagtctgccggcaaagctgggacgtccagctcctgtattcatggctgcagcacacttcccacttgcctcccatttctggccaaaggaatttgtccccgctcgagattatattgtaaatttcagttgggaacttctctcaacctgccacagtcacctgagttagctggcaggcttccacgaaatttcctgtgaagtaggatgaggaatggtttccctccatccgtgctggagactgggaatgcacacgtctcttcctgctgctgctcccacttttatattgcccacggctccctaaattagtctcagcactggttagggtaaggccttcccctgtagcctggattgccaggttctgcagtaggagtgtataccctgaaggcagtttatcccactcccacattcgtaggacttggttttctgcctggcttagaagatgcaggctgtagcctaccacctctttcaaagcatctgtgatttctttcagttttcttgttaagtttctaccttgcttcttgtaagaaaattcacggtgtgattatctacgtactcttttgtctttccaagtgagtgaggcatgataacagtgcctccagtctgccatcttgtagaaaaatgaatttcttaatacataactatgagtaggtacgttttttacaagttcagaatctaccttctctaaaatatcattcctaacttttggaatctggaccagatccttctatgtgctgtgtaccttaacaccatgtacatttctttatcatataacacatagtgtgggcttgtctactataccctgagacgataagattcttgaggactgggtcattatttataattacagatataaatttaaatctaaataaaactcactgcaatttttttcatagaagatacttcataaatgttgctgatatgaaaaattgaatctatgcccattgtttaattatcttcattgtcactgactaacttagtcttaccagcttaatacagtgtttatgaattatctcacagttcctgtggaccaggaatgtgggcacagcttagctggtacctctggctctagatctctcatgatgttgcagtcaagctgtcggctacaactgcagtcattcacagcccaactggggctgaagaggccacttccagattcagcctccacagagctgccttatgatatggaagctgtcttcctcatgaacaatcaatccaaagaagaaaaagtgatcacccatgatggaagctacgttcttttataaccaaatctaggaaatgtcatcccatctgtagtgagttgaatgttggcttccaaaaagatatgttcaaatcttaacctccaatacttgtgaatgtggcattacttggaaaaagagtctatgcaggtataatttaggatctttagatgccatcatccaggattaactggatgaactgtaagtccaaagacatgtgtatttaaaagatacacacagaggagaagaccatgtagagacagagtcagggactgatgtgatacagacacaagccaaggaggagtcaccagaagccaaaagaagcaaggaacaaaatttctactacagcccggggagaaagtgctacgtttccaacaccttgatttcagagttctggcttcccgaactatgagagaataaatttctgttcttttaagccatccactggtaacagtggtaatttgtcatggcagacaccaaaaacacaaaataaagttattgaagaaattgaagaaagtgattttactttcactgactttttagagtgtctgtttagtacatctatatatgtaatacatctgtgttaataatgatattcaaattaatcttcacctataaatgttaacattgttttttatttaatgaagaggtttaaagagaaagagttatgtatatttatgtagtatgtaattataattaataatccctttataaattaattactatttgaataaaatgatgaaacctagaaaagtggtttttcatcaatatgttgttctctgtgttgcaaagtgataaactgtaggccttttttagtctaaactagttattcatactatgatgtatcacttattacactgaagctttgactttcttagaggtcacattctttataaaatggcttaatttgcttttacagcatgatttatattgagaaaatttagtttggtgaaaaataaaaaatattttcatgagaataatttttgtgtgtaaagattgagctaaaggagggagaagagtaggatttgcattaatatctacaatgcatgaaaaaatggaagtggctatcttagagaaggaaattggcaaatcatgaattttaaattgcatagtttatcagttaggtagcctgacaatctaaactagaaactttttgatcaggcaaccatctgtgaaacaacacctatttatacaagcaatctgtgctatgtactaatcacatctacatttgaagagtctcttattcttagatcacaagtaacagaaactagttctgtctgtttaaacaaaaaatgcattttgctgaaaggatataacttagcacataaaatttgagggtaatcagatgaaacagttctcagaaaagacaggagccagactgttctaggcatctagagatcaggaagtggagagaaacagcagtgggtacttctgtggagctaaatatggaccaatagtattttttaatgttcttcctctcacactcacaaagggagtcagaatggctgagtttgagtcatttgccccctgccaggaaccacggcaactgattaacagttctcaaaagactgcctgtactaggagagagtaggtcccaaaggcaactttaaagttctggaaccaagacggagggcgaatatgggggcaaataaaaacaatagatacctcctaaaactctttttcataagtgttatttaaagccatcaaactgtccaggtgcagtggcttatatctgtaatcccagcacttttggagtctgagatgggaggattgcttgaggccagaactttgagaccagcctgggcaacatagacccctgtccctacaagaaaaaaaaaaaaaaaaaaaaaaaacatcaaactgtaataacaataaaatgtcatataataaagattttgccagtaaagtgagtataggtgaaataataatgttgcttagttctcaataggtatctactatcttgaaaaattcatttgttctttcttgtgtacatacttgtatttactaattgcctatcatatgtcaattgctatccttgacaatgagcataacattataaacaatggagttattccttgcttttatggagtttatagtctagtgaaatagaaataaaaccactaatatattgcaataagtctaagataggaggcatagaactataaacagagtggcttaaaacaacaaaaattcattgtataacagttatggaggatagaagctcaaaacctaggtaccaggggtcactgtccctccaaaggctctaggggaggatccttcttttttttccagcttctagtggctccttgtattgcttgattttaggcaacataactccaatctctgcttccatcttgacatgaccttcttccctgtgtttctctatattctttcctcttcttataaacatatcagtcattgtatttagggcccatcctaaatccagaataattttatcttaagattctgaactgattgcatctacaaagaccatatttccaaacaaggtcacactcagaggttctgggtgaacatgaacttttgtggggcactattgaactaccatagtggggtacattgttctgttggtgttcctagcagggtctgggtaagaggtggagaggagagatgatggtgacgaggctagtgtaacagatggtaaggaaacatgtaagggatttgacattatcctaaatgtagtggagtgccactggagggaattaagcaggtggatgacctaatcagatttgtgttttacaaagatcatattggatacaatgtggagacaaggagtaactaagcaatgctggaagaaaaaagctagctaggatattctatagtaatttaggtttgaaatgatgatgacttggagaaggacatgctgttgggaatgaagaacaataaattcaattctggtatgtttacaaaagtggaatgggctttgtgtgaattagagacaaaggatgctagaggaatcacatgtaatatggcccaggctgctgggttctgagactatgtggatgaaagttctaggctctgaaattggaagagagtggtgtgtttgtgtgtgtgtgtgtgtgtgtgtgtgtgtgtgtgtgtgtgtgtaagagagggagagagagggtaaataatgaatcagttttggatatttcttttagttttggttgctgtgagacttccaagtgagcatgttcaatagccagttgtctagtggcctgtatgagactagtgatgttgaataaacaaatcttagtatgttagtatataaatggtacctgaaattgttagagaattgaaaaaagtatatatgattactatagccaataaaggagtattatgcggaattaaataatgacatatagaaataatttttaatagcatatgaaataactattataaaaagctgagtgaaaagaagaaaactaggacacagctgtatctatagtaagatctcgatactatatatttggctacttttaataataaacactataagtgaatgcacttaaatgtagtggctatttctgggtgcttttatttatgtatttatttttacttatttttaaagtacagtgtgttcaatgagcatatagtacttttgtagccagaaaaaatccaatttttataagttgttagcacatataatgtacctgaaattggatattcatagcatggtatttttaaacatgagtgattaatttcaaagattgagcatcttttgatttatgagaaaaaaaagttgtgggagaaaaaggattataccatctgagccaagtatttatataacacctcaaaatatatatggggatagtattgtatgtccttaggttaagtagctatttgagaaatcaggataaaaatgctacttttggacataaagtagaaaataactttagcttgaagcatttttacttgattttgcaaaccatatctgtgaataagcaatttaataagacacagaaatagatcattttatgtaagttgtcattagtaataatgccaggttgccttatgtaaggtgattagacataacattcctgtgcagattttactaatttctgtaagactttaatggtatttagatttctggaatgcaaagctaaagctttaatattaaatctactttacatatccacgggttgtgccatgagaacagaacgtatttgcacattcttcttttctctcccttcccctccccttccaagtttcagaatattaattattccattaacacgtaatggatgatatgatgatgcgtttaaaacactcacatcatctttaggctattttgatggtaacagaggataattaatgccttgtaataactttaataaaaggctgaaagccggctagtacctacagtaaggaaaatcatttgatacttatgtaggaggttttgttttgttcttcacgtttttgatcattgcttaggtattattatttgctttgactcctcaataaaattatttactaaccttgacctgggatgaagcataaaaattttatcatttaagtaagctacaaaactcgaacattcttttacttgctgatggctatgaaataagcagaccctctttctttaaaaataattttgaaaagactctagtaatagatatactagaattaaattttttggttagttttttataaaaatataggtaataataattttgatagaaaagaaacaagcttagatttcaatagagatttggagtcttttaaagcgagtttacattacttatatcctttaattagactatgctgggaatgtttaaatgactttctctatacaaaattttggcttagttaggagtacaaacttggccttcctctagactatctatctgcttaataggccttttctttcccccttctagagtggaattttctaaattcctgagtgagttttgaaatctgccctaggatttttaacagtaataataataataataatggccaacacttacatattacattgtatatgtcaggcactgtcctaagctgtctgcacaaattaacacatttaatcttcatagggaaattttgtttacagatgagaaagcttatgtacaaaaagggaaagtaaatttacctaaggtccaatggcaaagatgggattagaacccagttgtagtccttgttttattcattacatgctactgcttgtagaaggcatacattaacatgagagaaagtatatcaatccaaaaatgtcaaacacctagtcagtattcccttgtcatcttattatgagactatctgacattcagctctatgctagacatattacatatttaatcttctcctacacttttgtaccctaagtctctcatatttcattcatttcagattccttaactcctctctcctaatactcgttttatagttttatttacatgatttctagtatatatcattacgaagagattccaaggtaaatctcttgtttttttaattaaaaaatgaaaatatcattttgagatagtaacacataaatatattgttacgtgccctaaattaacatgaaggaaaacaacagtagtaaatgcaggataatgaagtgattcaaagaacttttggtatccccttttataatttaaacttacatttgataaatctatgataaacgaagcacacacaggactcttccacttatacttcaaattcttagatagaagaaaaaataaatatggtatatataactcacttcagaactatgcaggaaaataaatcagagaactctcagtagaccaaaaagtatgagatatccagaaaggagactgtattagatttgagaaggaagccacagctaaatctatgcacaggggaggactgtcaaccaaaaggtggctgtggcactaagtctgtaccatactgagaaatggtaggctcctgatttttggaatagcagtgagcccagggagaagtaactcattgctaagttgggacacagcagaggagcaatcaagtattcaaacctgaaaatctcctgtttatcttctgtggtctagacagcaaggatatgagtttggactggagaaaaccagtgaagtattcagatgattagcaatggtgaggatgatctgggaactcatttccaggacactcactactgaaattgctctttttcagtgtgtctcaccattcccccactctcactaaagacagacttatagcactgagatagcaagagttaataaagtaagtagagtgcaatatatatgtaacagcagaggaatctaagaatctaatctaagattcctaatctaaaagggagtcaagcagaaaaaagtgaacaaaaaatttgatcactaatgtttttaaaagaaaccctcaataaattcataattataaagactggttgtcagcaagatgggctttctagtgcttgctcccccactgaaataacaatttgaacaactatccatgcatgcaaataccttcagaagagctaaggaaactgagtgtagcatagaaataagatgcatagaagacagttaaaaggacagacactctttacattacccgcatcactcattccccaaccccagccctcttggtgtggagacagatactctctacttggggcaaggagagagaagtgagccctgggttttgcctcggatctgaacactgggtccaccccaggaaaacccagtgttgggcaggtttccaaagcctcagactccaggttggaatctgcagagtgagtcacaaggcctgccctggtaccaggacagatccctcagcctcaggcttcaagcttgccaaggggactttatctctgggcccaccccgttgttaggctgacccctgtggccctaggccatggactggtccagcattagactggtcccagcagccctgggctttgggactaccatagaccaggccagcccccgagtctccatctctaggctgccacctgtggacccaggctgcaggcccaccctaggttccagaccagctccaagccaggttggcccatgcaacccaggcttcagggccaccctggcatcagatcagcacccttgacctcaggtgctaggctttcgactgtagacacaggctctaagcctgcctggtgccaggctggcccctgtggctccatcctccaggctagcccttgtggttgcatatcccagcagactcagccagggtctgggactgttccagctgatccagggtccaggtccacctcagtagattccagaaactgggcttagccccatggacctaggctccagaactgctcccatgcgaggtttcagactggtctctgtggccccagaattaaggccagtgcttgcagacctatcctctaggatagaacccaaacacccatgcccagcctggccccatggattcaggctccaagttggtccccaaagccccaggctccaggcctgcacccatgatctcagccccctgattggctctcacagactcagacatcatgtctttcccagcacaggtcagctataggctctaggctagttcccatggcatcaggctttaatagattcagggtccacacctgctccagcacacccaagctctaggcccagccctatggactgaggctccaggcccactccagcctcaggtcagccctcacagacttaggctccaggcctgtcctagtgcctggctggcccctgtcagttcaggcacaagacccactgcagtgccaggttagctctgttggacccaggcttcaggccagccctcagtgatgtaggttccagacccaattccacagaacctttaacagctccatgccagtggatccaggccccaagcttacattcagggactcaggcaccaggtctgcccattgcattgatgcagttaccaggccagcttacataaggaccccagcagcaagcctgcctgtggaccataccaaatgatctactcagaatttctggatgggctgattggtgaaggcttacccaaacaaaactagtctgcaaagactggaaaagtcctggtttcttcaaatgtgcagacatcaactcatgccacaaggttaagaacagtcatagaaacatgacatcacatgataaaatgaagttccattaactgacactaaagaaatgcagatgtatgaaccaactgaaagagaattaaaaatacggtcatgtcacttaaggatgtagatactttctgaaaaatgttcactgttaagcaatttcatccttgtatgaacatcatagggtgtacttatgcaaatctagaagatatagcctactatgcccctatagtgtagctgattgctacatatacctatatggtatatatcaaatagtattttgtgccatatacctatatggtatagcctattgctcctaggctacaaacctgtacagcatgtacatactgactatatgcagaatactataggcagttgtaacacaatggtaagtatttgtgtatctaaatacagaagaggtacagtgaaaatactatattataatcttatgggacaggaccaccatcatgtatttggtacaccattaaccaaaattttgatatgcaacacatgactgtaattgttttaggaaagctcagtgaagttgaagaaaaaacaaaaatacaatccaacaaaattacaaaaataatggattactaaaataaatttaaaagagaagtcaaactaatttttaaaaaacatagaaattatggagctgaaaaatacaattaatgaaataaaaaatgcaatagagagtgtcagcagcagagttgttcaaacagaaaaaaaatctgtaaacttgaagataggttattcgaaaatatacagttagagaacaaaacaaaacaaaaaataaaaaggaatgaagaaatattacaagacttatgggacagcatcagaagaacaaatgttcaagttatcagagttcatgaggaagaaaaatacaaaggggaagaaaatttaaagaataagagaacatttaaagaaacttatttaaaggagaagaaaaagacaaaggggaagaaaactttctaagcctggtgagaaataaatatccaggtacagaaaaatgaaaaatctctaattagataaatccaaataaaagtataccaatatatattataattaagctgtgaaaatcaaagacagagaatcctgaaagcaacaagagagaagaaacatatcacacataagggagtttcaaagaggccagcagcaaacttctcagcaggggcattccaggccaggagagagtggtgtggtagcttcaaaatgctgagggaaaaaaactgccaaccaagaatattttacctggaagagctcttctttagaaatgaaagagagataaatacttttcaggacaaacaaaagctgagggagttcagtaccaccagacctatcttacaagaattgctaaatgaaattctcaaagcttaaagaaaaggatgctaattactaccatgaaaacaggaaaatataaaattcactggtaaaagtaaatacacagtctaattcagaatattctaatcctgtaatggtgacatgtaaatcacctgtattttcagtatgaaagctaaaagacaaagctattaaaaagtagtaataactacaataattatttaaggattacacagtgtaaaaggatgtaaattatgacatcaaaaacataaaatgtgagtgatatggtaaaagtgtagcatttctgtatgtagtcaaaattaattttatcagtttaaaatagcctcttttaactgtaaggtgtcttgtgtaagcctgctggcaaccacaaagcaaaacctctagtaaatgcacaaataagaaaaagtagggaatcagaacatactaccagagaaaataatctcaaaggaagacagcaacaaaggaagaaaggaacaaaggatgtacaaaacaactagaaaaatattaacaaaatggcagtaataaatcgtttcctatcaataattaccttgaatgttaatggattaaattctcccatcaaaagacatagagtggatgaatggattaaaaaaaacaagtcccaactatatgctttctacaagaaacttatttaatttttaagtacacacacagattaaaagtaaaaggatgcaaaaagaaattccatgtaaatggaaaccaaaagagagcagaggtagtgctgtgatttgaaaatgtcccccaaatttcatgttgatagctcagtccccaaattcatatgtttactggaggtagggcctttgggaggtaattaagattagatgaggttatcagggtgaggccaatgagatgggactggtgtctttacaagcagcagaagagagaccggagctaacacatttgctctgtcttgccatgtgatgcctcccaccattgtcatgatgtagcaggaaggccctcaccagatgccagcaccatactcttggacatctcagcctctagaactgcgagttaaataaacttctattgtttattatttacttagtgcatggtattctgttatagtaacagaaaatggactaggacaggtaactatacttttatcagataaaagagacattaagtcaaaaactgtaaaataagaaaaataaggtcattatataatgacaaagggaccaattcatcaataagatgtaaaatttttaagtatatatgtaccaaacagtggagcacttaaatatatgaagcaaatattaatagacctgaagagagagatagactgtagtacaataatattaggggactttgataccccactttcaacaatggacagattatctagacagaaaacaataaggaaacattggacttgaacttctgtttagaccaagcggaccagacagacatataaagaagattctatcaaacagcatcagcatacacatttttctcaagtgcacgtggaacattctccatgatagatcatatcttagatgatgatacaagtgataacaaatttaagaagaatgaagtcatttcaagtatcttttccattcacagtggtgtaaaactggaaatcaatcacaggaggaattttgggaaataaatatgtggtaattaaaccaacgggtcaaaaaagaaattgaaaattaaaaaatatctttagacaagtgaaaatggaagcacaatataccaaaacttatggattgtagcaaaacagttctaagaagaaagtttagggcagtaaacaactgtatcaaaaaagaaagaaaaagaagcaacctaaaattacaccttgatgacttagtaaaagaagaaaattctaagcccaactcagtagaaggaaaaaaataataaaaatcagtgcaaataaatgaaatggagaataggacaacaataacaaagagcaacaaactaagagttgtttgtagaaaagcaaaatgaatcaacaagcctttaaactaaaaaactcaaataaaatcagaaatgaaagaggagaaactacaactgataccatggatatacaaaggatcatgaaagactgctatgaacaacaatataacaataacttggataaggtagaagtaatggacacatttctagatatattcaacctacttatgctaaatcaggaatcaacagaaaatctgaacagaccaataatgaataatgagattgaatcagtaataaaatttctcccatgaaggaaaagcccaggacttaatgccttcattaatggattctaccaaacatttagataagaattaataccaattcttttcaatttttttttccaaaaattgaagaagaaagaatacttccaaactcattttatgaggccagcattacctcaataccaaagccagacaaagtcactgcaagaaatgaaaattacaggccaatatccctgatgtacatggatgtaaaaattctcaacaaaatactagcatactgaattcaacagcatgttaaaagaatcattcaccatgatcaagtgggaatttgtttggtattcaaggatgattattcaacatatacgcatgtaataatgtaatataatacaacatagtaacagaatgaaatccctatgaaaacagcaaaagaccttgaatagccaaagcaatctagagcaaaatgaacaaagctggaagcatcacactacctgatttcaaaatatactacaaagttacaaaacaggatggttctggcataaaagaacagacacataagccaatgaagcaggataaagtgcccagaaataaattcccacatttacagttaattgattttcaacaaagattccaagaacacacagtggagaaaggacagtatcttcaataaacagtgctggaaaaactggacagttgcatggagaagaatgaaattagactgtcatttcatgtcacatacaaaaataaaaaaaaactcaaaatgatttaaagactcaaacataagacctcagactataaaactactagaagaaaacaaaggggaaaagccctgtgacattggtttgggtaaagatttattagatatattcacagaagcaaaggcaagagtaggcaaatggtattacatcaaaaataaaaggcttctggatagccaaggaaacaatcaacaaagtgaagagacaacctatggaacgggagaatgtatttgcaaaccataaatctgataaggggttaatagccaaatatataagaaattcaaaaaactcaatggcaaagaaacaaataacccaattaaagaatgagcaaatgacctgaatagacatttctcagaagaaaacatacagatgaccaacaggtatatgaaaagatgctttcctcatgactaatcatgaggaaaatgcaaattaaaaccacaatgagctatcatctcattagacgtaggaagagcccaaagtggctatgtggcaatcttaacttccagtttaatggaatcattgttgtgtcctctggaactaagacctctaggttagcagatggaagaggtctgtgggagttcactcaggctggtgggaaacattttaaagatagttataagaaataggcacagaccttcatggaaggctgggaggtttgcataagctccagtaatagatctggctgaaggcagcctaatccttaccttgagtaaataacttaaagtagatacagaggaatgtaagggagtttagctaaatagcttgtttactcatgtggtcataagacctacttttgattacccttgggtgcataattgctctctacttgggaggtcggcaatgtcaattaccctctagtggtgtttactcaagacctttgtcatttaatctatagtgaataaatgtgagcttcactggctgatcggggcatggctgtgactctttacagcacccttcttggtgtctgtgagtgcccgggaccctcagccagactgacaagcaaaatatctgtgtcagcgtatgttattcatccatcgttgggtcagggtctgtgggacagacccccgcaggggtccagtaaaaacctgtcaccaagtagctggctgatcagcctggatatggtgccatatcgaaggcttagtgttggtctctgctgctgacaaattgggcactcagtggtggccatagccaggtcagacttgatgagtggaagtccatgttgctgagcccatgcctaacctccatccctgccatcatggccactttgttcacgagtccactgggtgatgaaaggggtggctggggaaataggctgagtggtgtccacagaaagggtcatcctacccagttgattattaaaatcctcctcttctgaggtcaccctttgttgagcattcacgtaagataacaaatatcttcactttgtttttaaccactaagagaatttcatccacatacctcttccccaaatgtccttgtttccaatttttcaatcatgtttcttgcaagttcctgaccatccagccaaaccattggctacagcccatgaatcagtatataatcacacatctggccatttcttcttctgtgcaaagtgcacaacaaggtgcactgctcgaaattctgcccactgggaagatttcccttcttctgtccttcaggtatgtcctagaaaggggctctagtgctgcagctgtccattttggggtggcatctgtgtattgtgcagaaccatctgtaaaccaggccctagtcttctcttcctctgtgaactgatcatagggaactccccgtgaggccatcagtgcaggctcagggagagaaggcagggtggcaggagtggataccatgagcctttgaaccacttccttatgtaacttacttgtgccttcagacctgcttaagttcacaattccgctgagctggggaggcctcaggaaacttatagtcatggtggaaggggaagcaaacacatccttctcatggcagtaggaaggggaagtgcccagcaaaagggggagaagcccttataaaaccatcagatctcgtgagaactcactcactttcatgagaatagcaaaaggttaaccgcccccatgattaaattacctcccacgggtaatttaatgcacgcctacccttccttaccttcattgtgaagtaatagtgtgatttcatcttcacatccgcttcagtgaccccagctaacactgtaactctcttcttagcctgttgactcagaggtaggaagagcccaaagtagctggtggcaatcttaacttccagtttaatggaatcattgttgtgtcctctggaactcccacggtttccctcccataacacctggtgattatgggagccacaattgaagatgagatttgggtggggacacagccaaaccatatcacaaaccctttacgatactgttgaagtggtattgggcatcttttatccacttcccttgagagcactccgtatactgccaaggagacttgaagccttttgaattccattgttctttccaactttgcaaaattatttgagttcaccaatgaattaagctattttagtaacaagtaggtatgatttcatgtgacacaggaataaagtcaatcacatatattatttaatgtatgacttaaaaccccactctttagtgcctgctttgtttctggtactgatataatttgtactttcatatgctgtatccagaaactcaactcttaaaaataacttaccaaattttttttaaaatcttaaaaaataacttaccaaatctattcacagtgcagaggagaaaactaaagtctagaggattaagtgatttgtccaaatacattcagcaatgtaacactggagacagttaaactcaggctcttccgattgaaaattgatcattttttcataatacttttaatatatgttatgatttatgcatattgctgaaattttcagaaataatatgagatgcataagagtgcagtctaagatgtggcttcttcacatcactcgttgggatcactgggtcaaatggtgtttctagttctagatccttgaggaatcgccacactgtcttccacaatggttgaactagtttacactcccaacagtgtaaaagcattcctatttctccacatcctctccagcatctgttgtttcctgactttaatgatcgccattctaactggtgtgagatggtatctcattgtggttttgatttgcatttctctgctgaccagtgatgatgagcattttttcatgtgtcttttggctgcataaatgtccttttttgaaaagtgtctgttcatatcctttgcccactttttgatggggttgtttgattttttgttgtaaatttgtttaaggtctttgtatatatcttaagtattttttaaaattctcattatgtgtgcaattatttttcctccgaatatcagtctttcctaacagcatgtaagctccattggggtatagtttatttctgccttgttctttcctatcataatgtcagccacaatataaattcctagtaaataatgcttacataaggaattgaaagatagatgtgttactaattgtaaaggttggttatttattgagagagctaaggcttacccttttcatataggtgggttattttgtgtttgttaagagatgttcctatttcaattttcttgttcaaaatgaattttttaatgcattaaaataaagttagtgttgccttgtaaaaatgggtttagttggaatgattcattgattctgtaatcccagcaagttgggaggccgaggctggcggatcacaaggtcaggagtttgagaccagccggaccaacatggtgaaaccccatctctactaaaaatacaaaaattagtcaggcatggtggtgcgtgcctgtaatcccagctactcaggaagctgtggcaggagaattgcttgaacctgggaggcagaggtagcagtgcgctaagatcacgccactgcactccagcctgagtgacagagcgagactccatctcaaaaaaaaaaaaaaaaaaaagaaaaagaagagaaatggttcattgattgatttgtatatatttctagttgatggccagtttttagtttttgttatatgtcttctttactgaaatttgggtcatattctttgcgaagaagctacatgaatacttttaaaaataggaatattaaccacagttgtgtttccatttgacaaataatttttatgatttattagtatgaatctagccagcaggcacttgttctaaatcataacacttcagtaatcttcattggaaaaaaacataagttgtgtattttttagaactcagtttagcaagaattgagtaaaggatttgaaatataagatgcttgccctcccagagtgctcaaaagaatgccgaagctggaaaggctaacgtgtcagtagcttggcaattcccctgagaactccatactattaatcattaaaggagtttttgtaatatgtcaggggcttacaattttgctgtattatgaaaacattttgtgacaggaagataatttcaatttctgtgttaatgaatctgtgtaaaaattttaatcacacaattacagaaagagttctggtctttggaaaacaaactttaggtaattagagtaatttataatttcttaagtataattaatctgcctggctattttataattataagatgggattttaacagtgaataggtggtgtctgagggcccctttcaatgcctttgtatgaaatgataatttatggccttatggaataatgttatatcaagagtaaatatgtttccatgtagaatgtcttaagatgttagaatgcattgtttaaagatgatttatagcagtatttaagaacttaagcagcactggtttcatttcacaatcccagaattagtttacaaatacctaaaattctttactatagattaatatgatactgctaattttcttcaaaagtcctttggatcttttgctagagaaaggggtgcatttaaggaaactacacatttcacagataaagagcacaatttggggacttagaaaaaaagattatagaatgaaggctactttggttcctatatctcagggctaagtagaatgatatctgatgaaatctattccatctcagaaataaagcaactttatctcagaagattgcagggctgtacatatctgtctgtgaaatgtagctggagatactgaaaagtttaatggtaattcctgggggttagttttttgaagacccccatataatttggagagtgtgccacttactctgcgccttagaaaattaaaaaaaaaaaagtaagtttggggaaaatgttaacatctgtttaaatcttttgtcactgtagagcaaagctgaaaaaaggtattgcaataggaggcacaaatagaagaaccttgagtgtgatcttagaaaagaagacatggatgaatataggtgaattagaattgaagctgatgccaattttctgattgtaagtccatctttttccattataggattaaaagcacaagattgttaagacctgaaaacacatactaattgagtcctgaaactgagtgttagagtaataatgaaaggaaaatactttcattatttcaaaataccccaaggtaccttggattgagtccgatcattcccagttaaacattaattccattgtttgcagagtgatacaagtaaccaagatgccccagtgctctgttagaagattgttgattgacaaagctcctttctgcaaatgttttgcccattctgtgactaattcataaaagtttgtttgttttatttttaaccaatgaaaagagaaggaaactatcatctagaataaagtgggaatatactttagaatttttattaaatttatctttctagcatttcttattaagcagtgtttccactcttcaaaatgaaattcttcttaggtgatttttctttcttcccctctctctttttcctcccttgcttcctccatctttttttctcccttcccctgtcccacactactttcttcttttttctcttccttcttttgtttttcctttggggtggggtattgtagccctttcaaagtgatgaaaatattctatgattagattatggtgatagttacacgactttgtaagtattctaaaaatcattgaattgtacattttcaatgactgaaatcactgaattgtacattttcaatgactgaaaggccaactagaggttaactaaggtgactggagtgggtaaaatacagaacagccagcagcctattctcatctctcatctcagattgattacagcaaatcacaaggctagacactcagtttcaggactcaattgctatgttctttcagttcttaccaattttgtgctttttagtcttgtgatggaagagataggctgacaatcagaaccttggcatggatcacagctttaattcacctacatcaatttgtggtctttgtgtcctccatcctgagaaaggagactgtctgtgataatttagagacagatttgatctttatgaagataagcaacaggatagtgagctcttgaacatatagtagttagtagaaaagtgaacaaaaagcacacaaaacacttactgagtttaatcagatatagttaggaaaacagtttgagtatttatttttgaagtctagtagactgtattcattctgaagtaaatgccatgtcacaatggtgaatgaaaatttagtttttgaaaaagtattgtatgttcggtttttgaaaaaattttagatacctggaaaatactctttgtctacatcaggaagtttttcaaaatacctgaaagttaaattccattataaaactaggacagtaggaatccatgcatcaaaatatatttaaccttatacaaatacaagattgttttgtttttattgtgctgtcaaagtagtgtcagtttggttgcttttggtgccttgtctcatttattatgacaggaagttccttttcccattctctcttaggacatgatgtggctgcatcttgattgactatggatgtttctgcagagcttttaaagcatggctcattggattataaagaattgttttgttatatggttgctcaagctagtgcttttgcttgcattaccccaaagtttctttgtcacttacttcctgtgcagaagttgtctacctattctagattatggaaataactcagatgagcttcgtcagcaagaaggaagatgcatttaacattttttcccaaggctaaactatgtactataagttattcgaattagataaaaacaggaaaaaaatatatcactatagaatgtctagaaaagtggtttatgtttgttcaactgttctttcatttaaaaatatttcacttaattaaaaactattctcttgtaaaagataagtatatttaattttaatgaaaatttggctcaatggaattttgactgcatggaaacaactgtttaaaatgagaattcaaaggatccttattgatgatctagtcttacctcctcattgacaaagagtagatttttacttttagggaagagcttatatttccctcatttgtatttttttatttgtattttattttattttttgaaacagagtctcactgtcacctaggctaaagtgcagtggcatgatcatagctcactgcagcctcaaactcctgggctcaagtgattcttctacctcagcctctcaagtagctgggacttacagacacatcatctcacacagctgatttttttttgtttttttgttttgttttgttttgtttttttagagacagagttttgctatgttatctggccacgtctcaaactccaggcctctagtaatcctcctgccttgccctcctatagttttaagactataggtgtgagccaccacatacagtctgtttttatttaaaaaaaattaaattgaggacttgaagtttttatttaggattaaaggatagtttttaaaatttagtagagaaacacattatttcactggaaggtagtttgccaaaatatttacaatgcttacctctgattggttagattacggtttaattttttttcattttcttttgtgcttcacgtgtttcatgatgaatatattacttttgcagagatgaaatgacattttaggcctggcacagtggctcatgcctgtaatcccagcactttgggaggccaaggtggccggatcccctgaggtcaggagttcgagaccagcctgggcaacatgacaaaaccctgtctctactaaaaatacaaaaaattagccgggcatggtggtgggcgcctgttatcccagctacgcaggaggctgaggcacaagaatcagttgaacctgggaggtggaggttgcagtgagctgaaatcacaccactgcactccagcctggggaatagagccagacaatgtctccaaaaaaataaaaaagaaatgacattttataaagtacattttggctttaataattaatgtttcacaattttagatgacattttaaaaattgtagtaaaaacacaatgtgagatctacctttttagtaaacttttaaatgtgtaatacattattgttgactatagctacaatgttgtacagcagatatctaaagtttattcattttgcttgactgaaactttattcccgttgattattaactccccatttctcctcctgcagggcctggcaaccatagttactctctttgattctgtaaatttgagtattttgttaatacatacctaagtggaattatgtaggatttgtgtatctgtgactggcttatttcacttagtacagtgtcctcaaggttcatctatgctttgcagattgcagaattttcttttttttagagttatttttaaacgtatatgccacattttctttattcattgctcactggacatttaggtccacctcttggctaatgtgaagtgttgcactgtacataggcatgctggtctctctttgagatcctgatttcaattattttggataaatatccagtattaatttctagaacatataatagtttttttttaagttgtttgagaaacctctgtactttcatccgtaatggctgcaccattttgtattcccatcaacagctgtgtaagagtcccaatttctccataccctggtcaatacctgttgccttttgtctttttgataatagccatccctaacaggtgtgaggtgatatctcgtggttttgatttgcattttcctgttggattagtgatgctgagaaccttttcatgttcctgttggccatttgcatatcttttttggaaaaaatgtctattcagattctttgcccattttttaattgggccatttgtgtttttttttttaatattgagttataggagttcttttatattttggagattatcctcataatatatgtgtcttgcagtatttcctcccattctatagtgcttgtttttcacgcattgttgattgttttctttgctgtgcaagagctttttagtttgatgtagtcccacatgtttattttgttgcttgtccttttggtgtcatctgtaacatcattgccaagaccaatgtaatgaagcttttctcttaggttttcttttaggagtttaacaattttgagtcgtatgtttaagtccttaatctattttgagttgagtttagtgtacgttgtaagataagggtacaatgtcactttttttgcatgtggctatccagttttctcaacaccatttgttgaagagagtatcctttcttcattgtatgttcttagcacccagatcaattgactatatttgtatgggcttatttctgggttctgtgttctgttccactggtctatatatctgtctttgctctggctccatactgttttggtgttttgtaattaatacattttggtatcaagaaatgtgatgcctccagctttgttttttctggattgttttggctatttggggtttttgtggtttcatatgaattttagatatttgttctaattttgcaaaaactactattgggattttaatcagaattgcgttgaatgtgtagattactttgagtagtatgaatattttaacaatattgtctttcaataaatacaggatgtttttccatttattcatatcataatttcttttatcagtaatttgtagttttcagtatacaaatctctccttagttaagtttatttctaagtattttattattttggaaatgttgtggccttttcactcctgtagtttggtgggcaggagtgttacagttctgctgccctcagctcagcgagcaggagcattacagctctttcactccgacagttcagcaagttctgagttcttgtcccgtgaccaggaggaataagacacgtggacaccagagagggtgtaagtcagaatagaatttattgaatgaaagtaaagctcttgacagcaagaggggacccaaaagtgggtagctgtctgtgaggctgagtccagggtttttatggacttagaatgtgggagtgcatgctgattggtttatgggtgggctgggaaaaggcaccattcatttggtaaaagggcataattcagaaagaaacaattggcagagagtggatgagatgaggaaggaagttcttactccagtctgtggattgtatctagagtggtagctcggtttttaggctttagattgtccttggcttgaaggttaagtttcactggggacctgtccctatctgtctgggaatttgtctgtctcctgtcgctatcagtactattataaataagatcattttcctcatttcctctccagatagttcatttccatttctattcaacataatattggaagtcctagtcagagcacttaggcaagaaaaagaaataaaggcatccaaattggaaaagaggtaaaattctccctatttattgatgacatgatcctatatgtagaaaacttaaacactccattaaaaaactgttaaaactaataaacaaattcagtaaagatgcatgttacaaaatcaaattacaaaaatcaattgtgtttgtatatccccatttttaaatttcaaattcgtcaacaataaatttaaattagacctatgcctgtataaattataaacttttatatatatgaattgaaattaatggtgtttatattttaacttgaaatatttgtgcattcatgtatgtattcataaatatatatgtataaaacaaaggtaaaatatataggagatttttcttttaaagcggtttttactaaaatttcagaaataaaaaaatgagaggttatcattcccagccctttattgttagtacttttatcaacctactttacatttatcaatcacttaaatgttttttgagtgcccaatatgtgtcaggctaaggcttaaaaccacacacaaaggatagcttttgcaaatcttttgatctggtagagtgctaacatgcatatatgaagaatttcagataatatgatagattatatagatagatttatagagagtggagtgaccattcttgctggggagtgggccactccaatgcctgcttaatttggaaaggagctttagaggcagagggacaagtaatgctgaagaatagatgtatgaaggactcaaagcagaagaatggaaaatccgatctgtaattttagaaatatcatttgaactttatccaacttccaggagtgaaaacaccttaaccagtgttaaatagctgtttcttaatttgtttttattcaaagaaaaagtatcggaccaaaacctctgtttttatattttattgtacttatttatatttcatgtgtgttaaaaatccaaaattaaaaagaaatattcgcaacttaaataatcattgactaactgctggacacacttttttttttttttttgacctggtctttcttgacataatctaccttttcatttctttttaaatgtagtttttaatcaatcatgttgtatatcttttaaatattttatttcttcagctcaaaattctcctaatttttttcagcctgagattcataattttttaaaagtgctaattagtgattaatatacccaggaattattatatcactggtcctttgaaactttataaattttgatgtattgattggttaatttctaagaactagttcaattgcaattgtacttgcacaggtacatatgtatatgtatacacacacacatatacatatatatatatatattcataattaaatttatctctgaaactaaatatagaccttccccttaaccccctcctttacttaaatagccctgggaaatttgatatttgatttactatttagcgaacatgtaatttaataatgaaaacttaagatttgcttttcattttaaattatgaaactctgatatgttttatttattatgtgcacatttatttaaaataaatagagcaaacattcaaatttaattgataattttgatacaatttttaaaatccatgtttaaattcaagtgggaatttttatttttgaaaatctctgaggcacattataaataaattttttaaactactatgaaagtaccttttcctttattaagctttttccagtattctcaggttatagatataataaaactctttttgcttactttgtgaccatacatgagaacagtggaggatctctgtgcctgtgctaattagaggcaccctccttgtacagcactatttaattctctgctctttcggtttccagatgcctgtactcttcaaacatctctttgacctgtagactgagaagcactacccagaacttgagatttccactaatctctagtgctatataatctgcttttcaagagtcaactaaatttggtttcttttccttgcctacctatttccagtttattcactattctacaggatgaaaggaaaatcaggttccaccagctaagggtgaactttggagaaactctatgttagctaaataatcacatctttcttttctgttgcaccacactcaaaatagcttagtaaattagtagcttagtaaattattattataatcatcttattttaaaagatgaagaaatagctttatttgttgaaaacagttgaatgtgtaggaacaattatttccactttatggtactaatggaaaaattaaattagacagtatatgatttttcctaggcaatataggtaatgatagtgagaattaatacctatttttccaagtaatattctttttgctacacagtgctgtttattattatatatgccttcattattttgaaataaaacaattgttccattcagagattacatgattatgattcaattgcattttaagagtattatattcttttaaaacgtactcttagatatcttgagagggaaagcattgtttagattttaaaaatgtgatataaaaacaaagtttctctgctaatcagtattttctagctctttctaattttagtaacttatgaatataaagggtttattgtgaaaaattttaacatgttaaaatagttttcagatgaggtaacagaaatataaatgttcatgattagttagcttttcaaattagatagaattgaattgaaaatagcattttaattttaaattttatttctctcatctgcttctagaaaatggcattttaaaaatatataatatttttaaaattatttcacacttctataatgtttctattttctacaatacacacacacatacatactagacatgaattttagtcctaaaatataccttcaaaatcaaatgtagctctgcctcatttcaggaggaagctgtggtatttcatttaatataggctttaaaaaataattttataggcttaaatgtgctcttattgcaggaatcattctctgggcttgtggtataagtcattcagtgaaattagaatgtcaagtgcaaaactgaataccaaaggttgttatttggattgatgaaaaagatctagtaactagtaacaaatggaaaatgcctatttaaaaattgcaaatattttattgttttaaatttttatgtgtgtcaattttataatacaaaaatctcatcaaaattactaatatgaattgaatggagtttattataatcattgcttttaatttgtattataaaaagtttcaagcaggaacaaaagtacacagagtagtgtaacgaggcctcatgtatctactgtccaccttcattgatttcaatgcatgatcattctgttcatgtatatgctcattttgcaaccttactcccaatattattttgatgcaaatttcaacaatatattatttcacttataaatatttctgtgtgaatttctaaaaaagaaaactatttacatgcaagtactatgccattatcacattaaaataattagtaataattctttaatgtcatcaatagctacccaggtttcaaattcccaattgtctcatcaaaattataatattttgaatttacttgtttgtaaatataacctctactctctaacatgtctataattttcacatttttatatgtctttattttagtctctttaatcaataagtttttccataatttttttctctctgtttttgtttcccatgtaacaaataaatgtcatttgtgcagtagagtttcccacagtctggattttaatgatggcatccctgtagtttaacaggttcatcagtttatggaatttcttgtaaaatgttagctagatataaaggtttgatcagaatcatgtctgattttcttttggcaagtctatttcatagtggtaatgtgttctttcattgggagttatatttggcttgtttctttttttcgatattagtaccaactgatgctcaatgactttactgatttttcagggattgaaaatggttgttccaatcttatcattactaacatactaattaacagaatacttctaaaaaacatcaccactgcccatcacctactactggattatctagtgaaataatttatacaggaaagtcaagataattagatgattctttcccttcatttgctgactctcaaaataatgaatttattttctagcattgtttaatgatgagtgatgatctgttgttatgagcttatggatttagacatacttgacatatttcaacctgttgcagtttattattctaatccatggtttgttactcttctcattttaattagtggagtctcctcaactttgaactaagactttgtaccactcttgccctagactgtgaatcagccatttgtccaaggaactttggttttgggggttgtagtttccagtctttcaatagtcagagttcttttttctttaagataaactatgtcttgtatttacacagcttgttctaattcagaatcaggactgcagcagttttacataaccgtttatcttacatttatatctcttttcacgtatattttccagttctcaatagcactgaaggtaatagaattagagtatcactttcatcccatgttgcacacaacagagacatagaataacaattcaaatactacctcatctatatgagtactgagtttaaaatttgtttgcatttctttttgtcttcatgatgtatcttcttaggggtattacagtcaaattattatgttttaacatcacatgaaatagctcctgtctcaatgcttatactaccaattggatatgtatctaggatcgtattttcattttattttctattgtcagaaattgccctttttaatttaattttttacatttaaagtggtttattctgagccaaatatgagtgaccctggattgttacacagtctcaggaagccctaagaacatatgcctctaagtaggtgtttgggatatagcttggttttatatatttgaaggaggcaagttacaggcaaatacataaatcaatacatgtaaggtatacactggttcagtccagaaaggctggacatatcacagtgatggcagggagggtgggctcacaggttgtaagtggattcaaagattttctgacaggcaattggtagaaaaagataacctctgcctaaagagttgaacttagcagaaagagatgcttgagttaagataaggtagataagatcgctagagttaagactctagttgtgaaaatttaggtttttattatgtagatgaagcttccatagagcaggcttcagagagaatagatggtaagcctttcttatcgggaccttaaaaggtgtgagacacttacttctttcctggatcaggaaaagacctggaaagggaaggagattctgtacagaatacagattcccccataagagacagctttgcaggatcatttcagaatgtgtcaaataaatatattttggggtaaaatacctttatttccctcagggccttctacctgttatgtgatgctataccagagtcaggctggaatttggttatcttatacaacagtctcttttgttagttctgtgatctctgttttaatattaaagcttgtcagttgttcttaacctcaaaaatgtaggagtttctttatagcaatgtgagaacagactaatacagaaagttggtactgaagagtggagcattgttataaagatacctgaaaatgtgaaagtaactttggaactgggtcatgggcagaggttagaagagcatgcagggctcagaagaagacagaaagatgagggaaaatttggaacttttgagagacttattaaattgttgtgaccaaaatgctgacagtgatatgaacagtgaagtccaggctgaggaggtctagatggaaatgaagaatttattgggaactggagcaaaggtcacttttgttataggttaggaaagagcttggttgcattttgcctctgccctagggaactgtggaactttgaacttacgagtgatgatttagggtatctggaggatgaaatttctaaggagcaaagtgttcaaaatgtaacctggctacctctactagcctgtgctcatatgaatgagcaaataaatgatgtaaaactggaacttatatttaaaagggaagcagagcttaatgtcttagaagattggcagcctggtcatctgctgtctaagcttggaggcttggaaaatttgcagcctagcccattttctgggaaggaattcaaactggctgcagaaatttccataactaaaatgaaggcaaatgctattagccaagacaatgggaaaaaagctttgaaggcatttcggagacatttgtgcagctcctcccattacaggcatggggacctaggagaactcaatcgtttcatgggccaggcccagggccttgctgccctgcacagacttgggacactgctccctacatctcagctgcttcagctctagccatggctccaaggggcccaagtacagcatgggccactgcttcagagggtgcaagccataagccttggtggtttctacatgatgttaaaccagcaggtatatacagtcttaagagttgaggcttgagagcctctgcctagatttcagaggatatatagaaaagactggatgtacaggcagaagcctcctgcactggtggaaccctcatggagaacctctactagggaaggggaaatgtgtggttgaagcccccacacagaatccccattggggcactgcctagtggagctgtcagaagagggcctctgtcctctagaccctggaatggtagatacaatggcagcttgcatcctgcatctggaaaagctgcaagcactcagtgccagcccttgagagtagccatgggggctgagccctgcaaagccacagggacagagctccccaaggccttgggagcctacccattgcatcagtatgccctagatgtgagatattgagtcaaaggagtttatttcaaagccttaatatttaatgactgccctgctgggtttcagacttgtgtgaggcctgtgtaccctttcttttgatcaatttctccctttcggaatgggggtatttacccaatgcctgtatccccattatatcttggaaggaactaacttgcttttgattttacaggctcctaggcagaagggatttatcttgtcttagatgagattttgaccttggatttttgacttaatactggaatgagttaagactctaaagaactgttgggaaggcgtgattgcattttgcaatgtgagaagaagatgagatttggtaggggccaggggctgaatgatatggttgagatctatgtccctgctcaaatctcataatgaattataatccccaatattgtaggacgggcttggtgggaggtgatttgattatggggtggtgtctcatggtttaacgtaattttcctagtgctgttatcatgatagatttttcacaagagctggttgtttaaaagtgtatggcacctcgttcttctctcttttcctcctgctttggacatgtaaagtgcaggctccctgttggctttcttccatgattatatgttttctgaggcctcccctgaagccaagcagatgctgccatgctttctataaagcctggggaaccatgagccaatttaacctcttttctttataatttaaccagattcaggtgtttctttgtagcaatgtctaatgactacattcagagaatgactaattcagagagaaaagtaatctttgttgttttacccactcttgttagctctaaggactttaaaaaaaagtgtgttttttttttaatttactctggaaaacaaaacaaagaatgaataaagttttaaacaaaagataagcactgcctagctctgatgatgacaggaaaaggatactcacaggcagctaaatatttaaattatttgggactaagtcaaagaacatattatattgttagatagaggaaacatgactaaatgagtatttatggttttgtatacaggcctggtactatatcacatgaaggcagtttattttgactgtcatccgctctcaggtctgaagatgagtctttaacttgaatttggtgtcagataccagtgttgatgtttaagattcagtaggagttgggctgggtgtgctggctgtcacctgtaatcccagccctttgagagaccaaggcaggtggatcacttgagaccaggagtttaagaccaccctggccaacatggcaaaaccctgtctctactaaaatacaaataaatagccaggtgtggtgcatgcctgtagtcccagctccttgggaggctgagttatgagaatctcttgaacccaggaggcagaggttgctgtgagccaagatcttgttggtgcacttcagtctggtcaacagagcaagactctgtctcaaaaaaaaaagattcagtaggagtcagtactccttttcagatgagttaggagttaggtgtgtacctacgggtcaaagccttgcaacttaacagcacaaagtagtttggttaacaatatttgataaagaccctggagctggagagaattttttaaatgatgtttagtctttcggctagagcaggtaggactggaggtttttggttatttttgttgtttttttttttaagagacggagtctcgctctgttgcccaggctggagtgcagtggcgcgatctctgctcattgcaagctccgcctcctgggttcacccgccgttctcctgcctcagcctcccgagtagctgggactacgggcacctgccaccatgcccggctaatttttgtatttttagtagagacggggtttcaccgtgttagccaagatggtctcgatctcctgacctcatgatccacctgcctcggcctcccaaagtgctgggatttcagtggagttttttccttaagtggaagctgtaaaaaaattttacaaccttacagtggttaatttttataattttaataagcccctagcaatagctctaagtcagacacttaatttagtgttcgattttgaagatgtttgtcaaagatgttaaaagcctcaaaacatttgattaaaacagagtcataggtcattgtaaaataacagttattcatttatccagtgtgataataaaaagagctcaaaagtgatgtaaaaagttacatggatgtaaaaacttatctctcaaaatttagttttcttaaggcaattttaaaaaccgaataaaaacaacaggaattgttgcaaaatctttgtttcttaagctagttatcaaaaaggtaaggaagagcctgcagtgtgatagtttttgcttatgggaagctccttcggataaccagaaagttaaacttgatgaaaagagaatgtgagttaatcagacataggaagaccagtactatgtcatagagcccttaagcaagagaatatgtgactcttagcgacaacatgggaagttgcctggttataatgaacactttaaacatatgtttgggctcagaaaacaataccccacaatggaagcctcagaaacaacttcaaaaataaaagtttttggccttctgcccttctgtcactcagctccattttcccttgaggctgcccatagaaactagaacctcttttcctccatgtggatcctagaaaccaaaactccttttcctcaaagccagcaatacaaactaaaaatattaccctaatttttccttcacctttctgtgtgagaaccagccataaagaaatgctctgatcttccttgttggactgtagattataagactcccatacccagaaagaaggaagtgcttactcaaggagattaagaatctatacagacagacaggccttgctggcttttcccacacagtctactagcattaaagtataccctttttaatatcatattttcacgtctttccatactttattgacagtataaaattgacaatttaccctgtatctttggtctttcttctgtaaactcccccatatatacaccaaacaaatctgcataccttcccttcaaccagtctgtcttttttgagctttttcgttgatttttcagcaaaccttcagagggcctctggctgctaaacatattaagaaaagccaggagtacagaattaagttatactggaggaaaaccgtgtctttttaaaaccttcaaaataaaacattttagcatcaggctataacaacagatgtagaactggaggaaaaaaaaagtgttacaggagccaacaaaagttgaagcttcaatgaatgggtgtgtgaaagaaaaaaaaatgttgaagaagagagttagcatctcaggtcttctcaaagggtggacagttgaaagcagcagggtatagaaactgaacttttaaaatatcaatctgagaaacttaaaagaaacagattatatagaattaaaaatttaaaacttacaatttcacgaagagtaattgtaaaagtaaagaaatcttgttatactaaccaattatttagttatgtattagcatattttaatgtaaaagcttaatctctaggaagactaagtctcttaattatagcaaacttaaccacgtagaaaatatcttttattaattctgtttttatgaatcttatcacgacttacaaaaaccatttacaacatgctcatactttctattttgttgtagatatccatctgccttaactaaccagtcatttatgttaggacagaaatttattatacaaaattattctgtttttaagctttcttgtcagaaatacctcttaatatctgtagtttcttcacaactttctctcttacttactggtttctttttcatttgtttcataaataatattgaaatgaactttgaattagataaaaattattttccttttaaaaagaacacattttcatgtctgtcataatttttttaatccaaaccacatcttattttggcatacttgatatacagaattatataggaactagaatttttatacttagtaaccttacatttttgtgaaaacctaggaagtagaaatcttgaattgtctgtcacttcagcattttatagataagaaccattttataaattttttaagaaaaaatatcttcgtatgtattttttaaaattggaaattatacaggcatttaatgagtatatatcatttaatttactacaatttaagattttaaattacatgacaagctcatttataagcatttatcctgaaacatttacctaattaatttatttttaatagtttacctagattacttatgaaaaactgagatattagaaaaagctagaaattatttaaagttatttttctgttaatcattttttttttagtctgtgactatcgggtatttatctaagtaagaaccttaaggttaaatatatggtttttaaattgttttgccaataactcaggattttactgttttcattaaaccgacaacactgaatatcttttttatcaaaaattacacaaatataattctgttttgcattaggtttatagttttataaccttcatgtcaaaactggacacctcataatatctagcagagataaatataaaactgcttaatcaataaattcagaaaaaaatgtatattgatgattctgaagacattttaaaatttattttaatagtaatttaaaactcagcttatttatttaatatttacttaaatcacataaacttgaaaaatattttggcttatttatgtaatttttgagtactctattttcaagccaatttggtacctcgtggccaaaacacgttacaaaatacatgtccctacacataaacatatctaaacacacatacacacaaacacaaagatcatattgcttttacttcagaactctggctatgagatagtaatatgaacttaccagcttacaaaagaaaaaaatgtaaaagattgggtccaaagaatgggttttatcttgacaccagtagaaaagtaatggcagatttaaagcaggcagaaaaagaaaacagagaaacagataacttagctttgaagactctatattttaaaatgtgtacactagaagaccataaccagatgaagtactaaaaaccccagcatgcccttgaactttcccatttacgcaaatacttggaagcagaggtgccataaaactgactgggttgctccaaagggggtcattctctttgtctttcttcatttgtaaatgatttgtttatatatatatttttctttaagggaggaactgaactgtagtctagatttcagtgtagtggaactgagaagctcagtctgtcatttgtttatgcaacggacagtccggtttctcgagcaaatgcaaagatgagctaattgaaattgattatgagagaaaaaggcaatggagaagatcctttagaatgaacatctgaatcaaaattaggatcctgaaaacttcccaggaaaagaacaagctcagactaaaccaaaggactgtcaaccaagtgggagatccagggctcaggacgactaacagttctatcagagaagaatctctcagtcgaggggctttcaatgggcacatcttggtatcttagttctgagttcaggtaattcctttagcaggtcctgagttttctctgaggctgcctatgggtgccaattaatgctgatgaaagaaaccaaactctgtcaaatattcaaagaggttttttctgagcccaatatgcatgaccatggcttgtaacacagcctcaggaagtcctgagaacatgttctccttgatttaattttgctttataatttagcaaaaatttacatttttccacagttcaatttacaaaacaatttaaagaagagtggcctcaatccttgtcctctctaccttataccttttttttttcattataggtaaacaatggggtctgagagttagggcataatattccccccacttttttttaactggaaatttctagtgaagatactagccttatgtcattgtttttttcaggtagtttggattcctgaaggtgatagtataagaagagctgactgaataatatttccttagtgtcgcatgcagaaaacagttgatctgcaccttcatatttcagagttacttgtgtgctccaaaatcaccttttatttttattccttcagttgtcttctaccataaatcatttgctgtcaatgatgtcaaaactttgattacagtctatttttctttctcctttataaaaaatgccttggagttctttccctacattcccaaagtttctttttcttttttttttaattttaaaattttgctagaatttgagtagaatatgtctccttcttggttattatggtgactttgcccaagtttacaacatactcttgatatgtacatgtttttgaatttaaagtatttttttaatttttaattttagtatccattctgcctcttgttttggtttacttctttgaggagtcttatatgttggatttttttttctgccttccatatttgtgacatccttttgaatcatttttcttctttttttatttgaacattttcttatgtttatatttttgttttttttatagtgctacccattttgttgcattctttctggttcatttttccttttagacattacttactttccttatttttaaatttcctgagttctatcacccaatttctgagtttttctaatttttattcatattgttttttcatatcttctattttcttaattgcttttagctcattttgaaaaattaggctagagttttaatctgatttgttgacaatttttgtatgctttcattgcttgtagggatgttattttctcctccttttcttttataatcttatcacaactttacataagatgtgagcacaatgttttgttcatttttaatttttgtcatgagattagactttctaagattttaaacaaaggtagtggcttacaatatcttttctatatttataattttgtaactctcaattctggtggttttaatagatagaagtatagcttcatactttcagatttatcctggccttgtcttctccccagtgtttttctggactttttctttaatcactcttattccagtttgtctcagttggtttttatttccaaaatttacctttaatataagacttagtcctgaaaggtagcttttgggaattcatatgactcagattgttccaactctttttgatctgaacacaaacacaaacctttgcccttgccagtgagttggcttagaaaatgccctttcaattactgctgatctcattgacaacctgttgcctattttggtatgttaaacgggcttttggtatcctttattttctccaacactgatgccgctaccatgagtgtcttctgactattaatggcttactctcactcaattccattataagaatctttgagatagcttgtgcattaatttcctatgtcttataacaaattctatgccacatgatacacttggctgcttaaaattacagccatttattacttcacattttttgtgtgtcagaagtcccatagacttaccatacctgtgtccttggcgtagggtatcaccaggctgaaataaaggagttttctgggctgtattctcatctgtggactctactagagaagaatctgcttcagagatccctcaggttgtcggaattcatttccttgcatgcagctgcacaatttatggcaggatgcttcttcaaagctgttaaaggagagacaaaggctgtactttttgtagtctctaatgttaggcaaagactgggatctctccataggcagttcttaacatggctctttccttctacaaggccagaagaatctcttttctttaaaaaggcccagtccctcttttaatgaatctcacttgattaagccaggtctacgcatgttaatttctcttttaattaactcaaaatcaactgttttgagaccttaattatatctacaaaacctctccatctttaccatgtaacttaaggtaatcctggctttgatattccattatatgcataggtccttcccaccctcaaggggagagattgtacagggtgtgtacaccaggtgggcaaggatcttggggtccattttaaaatccaaccatcacagcttgccacctatttttgttgtagattttgttcctgtttttgtttgtttgtttgttttgctattctggttgtattatcttttattatggaggaattcacaaactagccatcatgattacctttccctaaaatcctttaattaaagttttgtatattaacacaatttaataggaagtaatacaatagtaacaaaagacactacagcatcataggtatgatattccgatatcaaagtataggtcctcagtctctcatcattttgatttaaaattactttcctcactgatttagctgatcctcccaagttctcattatagaaacatgttcatgtctccattatagcaattagtacattttattatctatattctttgacccttgatttctaaactggcaaacatggatccctacaggaaattcaaggaaaaaagagacattaaaatttgtattaaaagttattttttattttttaacttttgacttatattttcagctatatttcataatatgtgcactaatttaacaggtagtttatacatatagttttaaattgagtataatatgtgttctgtaagaatatattaatttgtacatattttggggcacatgctcaaacatttttcacatacagtgttcatgaagaaaacattttggaaaccactttttagatagtgaactattttaataggtgctgtatatctctatttctatccatagatcttttgcacttggcacatacataaaaacaataaaatgcagctgttctgcaataaactaacataatgttatcacttacctggaccacagcattatccactatagttctatcttcttttattagctttaccatatcagttctggtaggacaacttttctaatatgtccttgtttttagtatgtgaaaactatcaaattatgtttttcatattatatgctaatatctgtttactgataggatgaatatcttgcagaaatgtccctgaatctttcatagaaatgttaacacttatgctttccaggttacattttgtgtccaaggaatgaagagtattaaaatctaaattttttcattgtgtttgcaaatgctctttcaggctctttaaaattcagagcccaaacgatctaattggcagttgtacatatcaagctgaagttagaattgattatacattgcgatcatctgtttgttctatttagaggtgaaaaagcatttcttttcccactttggcttcagtatttgtttggcaatcaaagtacttggacttgtaagttacatcagtgtaaaatacttttttaaaaatgagatttttaaaaaatgtattctttaaaataatgtttagtagttctgagttcaaagaaaagacattcaacccagcaaccccattactgagtatacatccaaagtaatagaaatcattctaccataaagacacgtacatgtgaatgttcattgcagtgctattcacaatagcaaagacatggactcaccctaaatgcccatcagtgacagattgtataaggaaaatgtggtacatatacagcatggaatactatacagccataaaaaggaagatcatgtcttttgggggaatatggatggagctggaggctgttacccttagcaagctaacttaggaacagaaaaccaaataccgcatattctcacttataagtagaagcagaatgatgagaactcatgacacgaagaggggaacaacagacaccagggttacttgagggtagagagtgggaagagggagaggatcagaaaaaatacctgttaggtacctggcttagtgcctcggtgatgaaataatctgtaaaacagagctctgtgacatgagtttaccagtataacaaacccacacgtgcaccctgaacctaaattaaaagtttaaaaacattaaaaaataaatacataaaaaatacaaacgcagtgatgggagttctaatatatacttctattgtggtttgagaaaccaagactaaggttaatataaaatcttatccaggacaaacagaattaaaaagcagctgtgcaaatgcatttcagcccccaacttgcacttgcatttcatcttccaacatcttattggccaatgcagtcgcatgcccaatttcaaagcttgccctcatgaagtcacatcaagagtgtgatatatacatatatagatatagatatatcacatgtatagcatatattatgtatgatacattatataattattttaataattatgtcaaatacataatatatgactaccaaattattaatagttatataatcagtatattaacataacaattattaatataattattctattaatagtctaataattacagtaaaaatctataataattttgtttttttctgtcatttcttacttcctattacattgttactggttaattgcattattcccaattctttgttctcctgctatatatgttatatatgtctgccacatagaatatatatatcacaaaaaaaatgtaaagaaggcacaaaataaacttgcatgaaaaaatccaaacacatcagtagtcaaaaggaaataaagtagttaaaacacatgttttcagactgaaataaatataaatctatatgctgcttagagaactatattagtttacacaatgcttaatattattgatttgtatgttttcatgtctgtaacaataaactgtgttgcataatataaaagagaaatgccttcacttatatactatatatgttccagaaatgtataaatatctagttgcatttaaaagttttggaaccaatcctttcttaaaaaagaactctctatgaattgtttgttaaattaggaatattattaatttatcattttaaattgtactcttctccggaaaccatatttaattctttttcttatttccaggagagcatatttctaccaactattgttattcaataaatgtttagaagtcttggttagctgataatctcaacattccagagaaaagtaaattcagagaaagtaagagctgttggagttggaaagggatggatttcataaagattaaaatttaaaacatcaattttacaaatgaagaaaccttaaagaacatttttcattttgtatggcattttaatcatcataattttctaaattcctgtctggttgcaaattagaaccattaaattaaagttagaagaaaaaaaattctaccaaaatacataagcagacaaagacgtatatatgtataagaatgtcatttacagcattctttctgtatctccaatacctgaatatctattgtttggttaaataaattataatgtatccacacaatggaatggtaattggcctttaaaaatgtgagatgtgagaaaaagactatgcatgtgtgtacacatatacacacatgctactggtgtgtgtgtgtatgcgtatttgtttgtgtgttctgtaatgttatacaccaaattgctatcagtggtaaggacatgactctggtggtaggaggtaactgggagatgtggtgaggggaatactaattagactgtggggaggacgccttaattttatctttctatatctctctttttctcaaaatttgcaatatgcttttcatcatgaaaaaaatcaaaatgggaagtaaaatatcagagacagcctacactgatcattttttatgagtaaggtgatgcaggaaaagcattaattaaatgaaactgccttacatcaagtagtaccagacaatagaaaagggaaatcatttaaaccttattcgtttatgcatatcctatatttttccaaaatagagtaccaccaaaacatctaaataattcaaaagtgaggaaataacagagaggagatacattttttgaaaagtaaaactaaaaagagctggtttattacaaaatgcatatactggagatctatcacatttgctaaaattgggccacaaatgtggttctaatatttctaacagccagaccagataaagaaacatgattcacagtgttcattagataaaaacaaatctattgttgggaagctgtagcagtcattttgcatcagcctgagggcagagaggataactgttaaagcttctttcacatgtcattcaaatgctaaacttaactgtagaaaggtcccaatataaaattacaataaaagccaggttgtctaaaacatacctattttaaaagttaccaatggggaatacctcaatcttcaaggttacacggggcattaattaatttcggaaagggtcacactcatgcaaaagtttgttttgatattgtagtatttcaactttgaaataactcctgtcttcaatatactgcttacattgtttatgtgttatggctacaaatttttattaactgtagttttcactagccatttcatgttattattttttgagacagagtcttgctttgtcacccaggctggagtgcagtggcactatctcggctcactgcaaccttcgcctcctgggttcaagcatttctctcgcctcagcctcctgagcagtcatactatttttgcaataaatagagggtacctaaaacatccaaaccaagttgtttgttatcaacttgaaagtggaaccataatatacttaattcctcaatactttactatgtggaatatttttggtagaaaaaaagataagattccacttgtatattgggaaattttatttctgtcaatatcaagatgatggaataaatcttattagtcagtcttcagatgtatgttgggcctttattctcagctcagaatgctgctaggaattgtaggaggagaagaggggcaaaggagatgtaagaagtggtccctatcctagtttggtttgcatattagagggcaaaggctttgggatagcattctaagctctgccgggccaggtagatagcactgtccaatttgtggtggataaacatcacaagtcagtgtttggagatgaatataatatacctaacatctatatagtgctttaatatttacaaaatactcgcccttatgtttgatcctctccgaatccatctgcttagaggaaaccacaagtttcctcttattttcaaatctcccagcacatataagtggaaactatatatctggctttctatacaccctttacatgctgttcagtgaatcatgttgacaaaataaatgtttattatgatctgtagagtttaggaagctgaggctgaggagggttgatatttaacctaaaccactcactgcattttggagctgagatttaaactgagctttgccctcctctaaatccagcagtgttcctgcttgtattccacagtgctaggactcttatcaaccttgctgctgctcagacttgagccttcttacttggcttctgggaacctttgtaaggggtgtttgcattcaggctcaaatgcctagccacagtgaatcttccagagagatatgtaaaagagggagcctgaacatcttcctatcttcataaaattaagattgagcaataagatggagaaaagagaggcctgatgcttttcagtctaccttgagcccaggcccagggaggtccaccactgagcctcccacctgctgtggtttggttaaatgagccagtataaactccttttcttgcatgtgctagaattgattttcctttatttggatctgatagagccctgactgatagagctttatgagttaaataatgcaacagatctaaaatggcttctgtttactgtacaagcaaacattttgagttagactttgcgttgatgtgttgacagtttaagacctttggttttcaaaaacataaaaaatagcctttaaaaaatggctgaaaaatatcaaatgtcagtgaatagaaatgtacttttgtttttagagtaccagtaaaattattcttctaacaataattacagaggttaaattatttgtgtgaaaagtaaaataatggacacatttgaaattaaaacaattgttggtgacattttaaatttataataaaggtcaaaataaattttcttccatttgatgtttttgaataatatatggagacttagtgtgcaaatacaattttctgcccgtaaggtaatgtggttgttatttttgttgttattttggtctgatgacttttagtcacgccagtaaatgtagttagggcacatgaatcttcaggtcgtatacaaagtcattaacattaatagccacattctgagcagtttacaaaatgaagagagggaatttaataaagtcattataatggataaccaatttgctctgtgaataaaaaggcatttagatgttatatttataaaaataaaacaaaaacactttctaagccacttttgaaaaatatgtaaattacctagaagtactttttttgtttgttttaattttggctcctaggtaagtactgagatgcttttgggaaaataggatacactagagagtctgggtccaaatctcacactttctacttaaatgattgtagacaaatttatccaactctgtttcctcatctgtaaaattgggttataaaattcatggaatggtgcttggcttatagtaaaaactaatagctgttaatatcttatgatatgacacagctgaatcaagtagtttttatgtgctttgctaattaaataatggcgctataaaattcatgactttgaattttatccaaaagatcagattctgtcccttctctcagcttccccatcatagctttccctgtctgaaaaacagcctgtctatcagctttgtaccagagaggagttatcaaggaaacaaaatatacaggtgcataaacagtcttaggagactgaaaattcaggtgccttatgaagaagaaaacagcggcaacaacaaaaatcccttaactgttcatagttttaaatattaaaactattcatgtttgaacccctgttggatttgtataatggtcttggggagaagatgcaccagagaaatgtaagaattagcaagtatccagagagatatggtacacttagctaaagcgggctgtgggggtgggggttggcggggggttcaccctttcctgacttaacttgctagaacagtggttagccaaatgccttaaaattggacatgtgcttctagtttcacataagccttgctgcccctattatgttgtagctggcacgatttacatgtttattttacctcctgattcgtgaagccctctgaatgttcaaagtctgatctaaagccacatctatcacattgtagacattaaataggactccctatggtatttaaatcaacattcaacacaatggctaccatttcaccataagaaaaaaaagagtttaatgattgaccctcgagcctaagcagtcaagcaaatataaagttaaaatggagtttcactcatctagaacagtattttatcagtttatattatgagaaatttagattacaaacctgtatacagttctataaaatgcatgttttgctaaaaactgattttataaatagcttaaactgaaaaaatgaatttcttttcttttttttttttttgagacagagtcttgctctgtcgcccaggctggagtgcaatggcacgatctcggctcactgccacctccgcctcccgggttcaagcaattctcctgcctcaacctcctgagtagctgggattacaggtgcctgcaaaaaaaatgaatttctaattctaattataatttagggtggaatttaaatatttcaattaagagtagtaattctcatcatatttgtttttcttcagaaagggaaagtcaattgcctttttttttccattccaaaaataaactattggaaagatttttgaaaatccactgtggcatcctattttctttcctagtactcatggccagttcctagcgtcttcttctctacagttttacttgtattacctgcatcccagactattacatacacccttagctgatcttcctgccttgtaaactttccttattcaaatttgctgttctccaaggatacaaaattttctttaaataggaggaataagttcaagagatttgttgcataatatgatgactgtagttaataacatattgtattcttgaaaaatgtggatgtaaagtgttctcaccacaaaaatgataaccatgtgagataattcatatgttaagtagctggatttagtgatctcataatataaatgttgaaaacatcatggtgcacatgataaatatgtacaatttcatctgtcaatttaactattaaaaaaacaaattatacgacactggtctttgcttccaggttaatattgagaaaacacattttccttgatcaatatctaatattatctctcaaagtattttttctacctgcaatttaattggaaaatatgactccttcataagccagagtgatttctgctttcctgaactttgggtcactcctttctctcacagccacttggcagttatccatgcccacattgtatcatagtaatttccgatattctgtgtgcattccggtcctcagcatataactgggctggtgtgatggaaaatgccaagttcagtactttgtagattataagcagtcagtacattttatattgaaattctgatattgtgcatttcaggtcagcaaattctctccatgttgtctgtgaagctttagacagagtttactaaaaatatcctatactttcacctaaacactggcagtgacatggttttaccaaatgtatctttttagaatcttgtgtaataaatagtagattttgaatgataatatgagaatatgaagaaattttaaagcagactcaactgattgtcacctattatttaatgttaatatcctaattttctgccaaatttataataaaatgtaacattctaatttcaaagaggaacgaaaaggttcctagtttatgcagagactgaattttcagtatctccatattcttagttaatgcatcccagactctccgatgtttcttgctgtgatgggtgcataaaccttgacgtttgatgccattcagccttatctcaattctaggtttcttcctcagcttgctaactctgtcttgcaatctatctaggtccctagataaatgaaaattatagtagaaacaaatgaggaattgtttaaaggaaaaaaaaacaaaaacactgaaagcaggaaagatacagagcatgcatttgattggaagagagattcagagacagcaatggcaggagacccaaatggcttatgagtgactaaagcaaggactgtctatctactctattccaaaaatgagcatatactaagtgctctagcaatcaatagctttgataaaaataaatatttttgaaatacatagggttaacaatggaaaaggcatgtttgagacctcatcatgtctcttatatctatttttatttcctaccactccccacagactcttctccaggtctgtcatgataccagatgagcacagtacttcatagattataagcagtcaataaattatgagtagtgtccacaactagtttttagtggaagtcagagatttttgggacatttagaacagtgttgttgggcagtgaaaaggatcttttaaaatcttattcatgttctattattctgctattttctttccattccagatcattattaatcctaggagttgaagcaggttttctaatctctggatgcattttatagatggttggggaaaggtagtaaaccaaacatgaacatgtcaggtaattttaggatttaacttcagcctctgttgcagggactgatcatttaaggtctgtaaactcgtttatgatcacagatttacatatggtagacactattagctgcccattcttcagccattcctctagcctttcttgtcaatgagtccaccatctcctagaaaggctaaaatgacccatattcatttccctactttttgagggagatatcatctcatcaggagaccaatttttgcttgggagcatctagaaagtcttttttcatgcaataaaatgagatattcttctacctgcatttatatatgattacctaaatagagacagccaacttgtgactgtgaaacaacaacctaaacacaagagtaatcatgtggaggatgggacaactgaattgaaaacactagtgtcctggataatagctattttctgggatatttaccaaccctggaaccattgactttctgatttcttataaaatgagataataagaccctattatgcaaaccgcttttggtcagcctgttacttgcatctccaaagtatccttacaaagacaaatggaatccaagtttggctactcttaggtggcggcataaaattgttcatagggcacaattctaacttcttagactctgagttcaactttgctttttgggtttttgtatttggattctgctattctgactggatttaggttactggattatctgtctctgccacaaatgacttgtctggtttaaatttcttcagtgccagtgcttgttacatacactaggatcctttcactttttgacatgtttatcaagcaggactttaaaacagtaaatattaatttatatacaaagaaaatcagtgtttgaacttatatggatgaagtatgctttgacttaatgatgtagtggtatttcttgctagacatttgacatattttggaataaaagttgctctggtcactttcattgagtgatattttggaagtgtcaacaaaaagagtcaaactctgtaaaatatttgaagagatttattctgagccaaatatgagtgaccatggcccatgacacagccctcaggagaccctgagaacatctgttcaaggtggtcagggcatagcctcgttttatgcatttagggagacacgagacatcaatcaaatacattggttgtcccaccagaaaggtgagacaacttgcttccaggttataggtagaattaaaaattttcatattggcaattggttgaaagagttattatcaatagaaaggaaaaggaatgtctgggttactataaagagttgtggagaccagagttttatgatgcagatgaagcctccatgtaacaggcttcagaaaacataaattgtaaatgtttcttattagacttaaagagtcatttctatcagcagttctgaaagggaggagggtataatgaggcatgtccatcttccagcccccatgatggcatgaaccagtttttctggttaaatttggattgccctggccgagaggaagaatctgttcagatggttggggggccttataagtttttttattttgttttgtttttgtttacagaaggcattgcttcatgataatgaatctgagatgggagtcagcctggtatagtggaatgttcaaactctaatatccattagagtcacaccagcttacagtaacattctgatcccactacttgattgacacataaatttggccaaatcatcttgctgcattaatccagatgcaatcatgttgaattgctaccattctgaaaatattattttgagaaataaatgagatgctacatagaaagtactggtgcattgctagacacatgctaggtgccaaatagatagtatatcaactcttcagcactctctgcaaatgagattgaaatgaggaatttcagctactctgtgaacctgctggttttattttattccatactcacaacctgcatgatgctgtaaatgtgtcttgttttcttattgatcactgtacgttttttgagagaaagaattcaaactcattcttttcaggacaaagcataaataaagtatcagtaattgatacttctgtgggaatatagagatcattctggtcaaagcaaaaatcagacacatagactgaagacataatttgaaacatcagaacccatagtctgtgccaggtccaaacaaaggtggtaaaatcagagatatagtttggattctgaaatagtggaatgtatggaagtttgatcacttgtggtggtaaaatcgcaaattagaagcatttcagaatgtttgacaaagtttacatagataatagacaacaagtgtaaaagcagagttgttaataatatctagttttaggaaatatttgtgtaattctttgtcctacactgttataatcaatcaggatctgtattatttctttttttgctattccaacttttgttctcccatattatcccagaaataattttcccatgtcactgaaaagaataaatcaatttaaaaacagtaaaaatagtaaaataaatattttacttaacaaaattatcttcctttggaaaacacgtgatgagaattgaatttttatggcatttttaatatagcactaaaatttcctgaacttgccattagaagagctggagtcagatatttagtgtcttaccaattgtatgatcttggaaatatttagaacttacattggacctatgtatcatcatctataaaataaaggttgttttacctgcttcagagaatgactgtattaaatagaacatatgtgatatggtttgagtatttgttctgcccagatctcatgttgaaaggtaatccccaattttggaggtgaggcctgagttctcatgagatatgggaggtgtttgggtcatgtgggtagattcttcaaggtttgtggctgtcctaatgatagtaaatgagttctcatgagatgtggttgtttaaagtaggtggcaacacccctcccctttttcctccttctctggccatgcaacatgcctgctcctgttttgccttctgccatgaataaaagctccctgaggtctccctggaagctgagcagatgccagtgccatgcttggacagcctgcagaaccatcagccaataaaacctattttctttattaagtacccagtttcagatgttcctttatagcaacacaaaaacagccaaacacagaaaatatgtgaaagtgcctagatgttcagatcttggcacagaataggcacataatagatattcgctgaacctaaatgtgttattcttaaatttggtatttgtcttttccaaccccatttttcccacccttgcagaaaatcagaatgtttatctttcaaaaatatgttagtcctatagtaattctattttcatttatcttatcaagtactaaagctaacctcaggcgtaggtaatgtgtttcagtgggttctgttttactattttttcttgtttcgtcttccacacaacttttctttgtattcccctcctcccccaattgagtctctatgatttgcagctttggcctgcaaccccaatacatctatttattttgctcactaaggatattgtgtagaatgaatactaattaggtagtgaatatacttctggggatagcattatggaactcggtttataacagtatcaggatacagatggcatgagcattgtgagatatcattacttccatgggtagtatagagtatggagtacaatgatgaagctaaaaattaaaataggcatttctactgtacgcttttcaaatgagaatacatttctgctaatgggaaagattgtaaagaattcccattgctactctgggattcagcatcttggaatcatgcctggaaataatgcattgaaaagattgtatgagattatggccaaagtgaattgttgccacattattggcaaattcagtgagaaattggttttccttgaagtttaaaggaggtaggttttagcaatagttcaaatggctttatagagtttattcattttttacttcatttggatatttagaaaactgttcttggctctgattttctttcttcctcttttcttctctttcagtagtacacatttagatttcagcttatttattctaaatctaaccaaatgcttcatacctatggtttacatatcaatacatgcaaattgatggttatctaagataatattaataatgtacatgatatgaagaaattgccaaaaatgtttgttatgtgatcatcaccaacaccattaagaaagatactttagtgatcttgtgctatatttctggcactgtgccaggtcatttaggctttacagaacatgatgaaaataattattttactgatgagaaagtagggactttcaagtttacatttgtttgttgtctaattactatttttatcataatatttatgtatgtaatcactctaggtttataataaataacagttaagtgtgtataatacagttaaattatattagaatattgtaagcattctttttaaaccatttcttgccaatatatgaaataggggaataatagttacctggagtaattagatgtaggaaactagcttagtgtgcacatttttaagtgacttcttcagtattaaaaaagtagtgtttttctaatcactatatagatatatacattatttatattcatctgggtatatacaattatatatttttccctgaatgctaaagtgggtgcactcagtgggccacgatgaattattatcactttctttgactctctttcatttagaatgttttatacaatattaaaaaaagaatattaggacatgacatttctttttgagacaaagatgtttcccgtttattaagtgcatttgtacttaataaactttccaaaagaattgctcttctatagttcagtttgggacccacagaagcaagagtaggattactccatgtttcaggagcctcaactttactattcaacaaggattgcaattcgagcaccatctgcttcacagctgagaatcattaagcttcagcaacatttccccatctcagcacctgacttctgccaagcaagtaggaagttttgccttcaccttcacctttcagcaaattactcaattagtaaatgggtatatgctaccatttaaactccaaaatgtagtgactctttttagctgaaaacaaaccaccattggtatctaaattaacattgtattttgctgatgatttctaaacttgaattgtttttaaatgctacttttctacttaatttttcctaacaatttatgatgtaaaacacatggtacattcgggaggaaagcatgttgtttcactttacctgaccaatgttggcatgatcaaagacattcacaaatgttcacttttgttggattgctgagtgagcatatttgtgtgatgttaaaggaatgagcttgggctgtatgttgccacatatggtttgcattatgataaatgaatgttaataggaaaaaaaaagtaaagcattggaaacatgagaaaactccagatttatttctctttaaaagaaagtttttattttacatctaccaagacaggacatctttgtaacagggcatatactacatttttatcattaagtaattattatctgctgcttattctattaaatgagttaagtgaatattttccagcactcaaaatgtgtttacattttatggatagtctcataattttaaaactgattattttaatttaggctttttggttttctcaatattaatgtcaaaattgaaaatacaatgtttttaaagtgtgctttgcctgcactttgtaaactatgtaactggaaattctcttatctctctttatagtttattcttctctttgatatccctgccagattatactaggaaaataaaaaagaatacattttaaattgcactaatgtaattcatatacattgaagcagttggtttttatgtatgtgagaaatatatctgtcattaatatatagtaagttaaagttttattttaaaggcaaatatggacctcaattagtgatagtaaatatgttttaaataggacatttctccagtggaagaagtaagctttgaaacataaagatgtgcagaattaggatgaattgttttataactgagatttttataattttggatcactagaaaagtaagtatatgcactacagcatttaatattttctaatatgcagacttagctttctaaattgaaaaaggcaggaaccaaccagtcttgttattcccggacttgtgccttttctgtctagttgtcactaaatctgaagattaggctttgtgactcctcttttaatgtgttaagaataatgaaaggaaagaaagcaccagatccaaaggccagtgtttatttccatagatgaatcagagaactagaaaaacctggaggtttttcacctccaggtcaccagcctgaaagcagagcaggcctactgggattctgcctgacaacaattttaggatataaaaatgcaaaataaagagatagatcacatagttcaagtctcctttttagatgccaagaattacaaagagactgtgtttttccccacatatttatgaacttttcaaacccatcttatttaagaatattttttcattttatcttctgcaattctcacttctcaagaatttatagaactttattcctgtattttctattataagcataataaatacactgttaatatgtgtttcaaaacaacaaatggtaggtcccttgccctgcctcaactgctgatactgtgacatgtgctcctacctacttgggaagcactagtccaaagcaatccacagtgtcattttggggtactacatgacaaggatcgagtttcccaccttgtctgtttctcccacagtctctaacagaattcttgtttctagaggtagaatttgaatattttattaatacaataatagggtatatttcaaaagtagtaaatcatattaaaactattagcacttacaacattaagtagtaaataacacagcagaaatatcaaatacacttttttggaggattgtatgtaaaacagtcaacttaaattcctatttctaacaaaaggtatatttgccctttttttttttaaggtggggtctcactatgttgcccaggctggtctccaactcctgggctcaagtgatccttgcatctcagcctcccaaagtgctaggattacaggtgtgagccactatgcccttctttttaatatggaattactcacttttgtcttttatgtatttatctaccacaaatatctgtttatgtgttaaaataagccaatttacaaaatgttaatttacaattcttctaattttatgtgttaatatagatatacaaaacaccattaaaatggagaggaatttcagagtattgatctatttagaaatgtaaatgtttaaaatgtaatgttattagtgttctgtaaaagtgttttatcctaaagtatttattattctagatcttttgccccctttaggccttcatggaaacgtttacatgattgtcttcatagtaactcattatatgtgccctcttgtaggacctgggcttgatatagattggtgggtgtgactcagcacccctatcaagattttggaaactaagccagagttaagcaacagcataaacatttatcacaaatatcggagtacatggggactctgagttttcccttggcttttcattgagtaaaggctaaataataacagttattgacatattccaagatacagagagcaatggccaatatgtagttcgaattattatctttttctctgcataacttgctcaaaagaaaggattgcccttactcaacctcactgcacttcattttgtgtgtagtacaagggtaagggtggggaataattccactaagtaaaacaaagaccagaaatacgaaaagggacaagtcaaggtttccagcaggaaaagatattctaggttacatgtgtgaattttgctagttctgtagatgctaatgcttcaggtgcttttggcctttctttctttccactgcactcttggctccccagcctggacctggtcactccatctggtaatgatgcagggtttttctcagccactttgccacctggggacccgtatggctggcaaggcccccctgctgcctgagccttgctcaggcccaggcctgccgctggaggtaccctgcccactcagcctgcctgtgttatagcttgtacccctgtttggctgctcccaagctcttgtcctatgtccaagaagactaaggatatgctgacaatttcaacggtgaggatggcagagaataattttattgagtgatgggactgctctcagcagagaggggatgtgggagtgttcccccaatcctgcagtctggtggtttctcccccagtatggcttagtctggggtttttataggcacagaatggggagggcatgatgattagtttgtgagtatgcaaaaaggttaaaacaaaggcaccactcaaaggtgggcatgacacagtaaaaaactaattagggaaggataggtatatgtaaaataggtgaacagtggggatcaatcagaggaaagcatgccagacaggaagacaggttctcaatctggtccaaggatttacccaggacagcctttgacttgaaggtggggtttcaccagggaaccacctctatctgcctaggcatttgtctgcctcctgcctctgtcagtagatcaggatcaaaagggtctaattcaaattggataagaggacttactggtgaaaaggatgaggaaatccaaaactgaagactgctggtacaaatgaataaagaggatcagtaattttagtcactgaccttagttgtgacgaaatccacattaggcatagggacactaaagtgtatctttctcttctacctcttatctatgtcagaagaaactttaagaaaaccttcggctgggcatggagtttcatgcctataattgcagcgctttgggaggcggacatgggagggattacttaaagctgagttccaatccggcctgggaaacatagtgagacccccatctgtacaaaaataaaaataaaaacaaaattaaccaggtatgagggtatgctcctgtagtcccagctactcaggagggtaagccagttggatcacttaagcctaggagtttgaggttgcagtgagttatgatcatgccactgtactccagccttggagacagagtgagatcctgtcttcaaaaataaaataaaataaaataaaatgttcttagatataaatatattcacatgacagacaaaatgtattagtatacctaggtgcatatttcccctttggtcattaatttgtgaacaagtttcaaccctatgataatttaaaaatattcccaaaacagtaaattgtaagtgaatattcatgttgagtacatgatgtggtgtggctgtgtccccacccaaatctcatcttgagttgtaactcccacaattcccatgtgtcatgggaattatgggggcaggactttcctgagctgttctcatgatagtgaatgaaactggagatctgatgggtttaaaaatgggagtttccctgaacaagctctgtttgcctgctgccatccacacaggatgtgacttgttcctccttgccttctgccatgattttgaggcctccccagccatgtggaactgtgagtccagttaaacctctttcttttgtaaattgcccaatttcaggttatcagcagtgagaaaaaggactaatacagtaaattggtaccagtagagtggggcactgctgaaaagataactgaaactgaaaagataactgaaaatgtggaagcgaatttggaactgggtaacaggcagaggttggaacagtttggagggctcagaagaagacaggaaaatgtgggaaagtttggaacttcctagacacttgttgaatggctttgaccaaaatgctgatagccatatggacaataaagtccaggctgagttggtctcaggtgaagaggaggaacttgttaggaactggaacaaaggtgactcttattatgttttagcaaagagactggtggcattttgctcctgccctagagatttgtggaactttgaacttgagagagatgatttagggtatctggtggaagaaatttctaaacagcaaagcattcaagaggtaacttgggtgctgttaaaggcattcagtttcaaatgggaaatagagcttaaacgtttggaaaatttgcagcctgacaaggcaatagaaaagaaaatcccattttctgaggagaaattcaagctagctgcagtaatttgcataagtaatttgcataagaatgttaatcaccaagacaatggggaaaatgtctccagggcatgtcagagacctttgcaacagcctctcccatcacgtgccggaaggcctaggaagaaaaatcggttttctgggctgggcctgaggtccccgtgctgtgtgcagcctaggaacttggtgccttccatcccagccgctccgccatcgctgaaatggacgaatgtagagcttggactgtggcttcagagggtgcaaacttaaggccttggcagcttccacatggtgttgagcctgtgggtgcacagaagtcaagaattcaagtttgggaatctctgcctagatttttagaagatgtataggaatgcctggatgcccaggcaaaagtttgctgcaggggtggggtcatcatggataacctttgctaggacagcgaggaagggaaatgtggggtgagagttcccacacagagtccctactggggcaccacctagtggagctgtgagaagagtgccactgtcctccagaccccagaatgatatatctgctgagagcttgtaccgtgcacctggaaaagccacagacactcattgccaactcatgaaagcagatgggagggaggctgtaccctgcagagccacagggtacagacgtggagctgcccaagactatgggaactgatttgctggatcagtatgacttggatgtgagacatggagtcaaaacagatcattttggaggtttaagatttgaatcccccactggattttggacttgcatggggcctgtagtcccttggttttggtcagtttctcccatttggaatggctgcatgtacccaatacctgtaccttcattgtatctaggaagtaactagcttgcttttgattttacaggcttataggcagaagggacttgccttatctcagatgcgactttggactgtggacttttgagttaatgctgaaattagttaagactttgagggactgttagtaaggcatgattggttttgaaatgtgaggacatgaaatttgggagtggccaggtgccaaatgatatggtttggctgtttccccacccaaatatcagcttgaattgtaactcccacaattcccacatgttgtgggaagaacctgttgggaggtgattgaattatgggggtggctcttttctgtgctgttctcatgatagtgaatgagtctcacaagatctgatggttttaaaaatggtaagttctctttgcctgttgccatccacgtaggatgtgacttgctcctgttgccatgattgtgaggcctccccagccacgtggaactgtgaatccagttaaacctctttctcttgtaaattgcccagtcttgggtatttctttataagcagcatgaaatggactaatacagtacaataaagggatatgataagaagaggaacataactgatgtagtttttaaggctggatcagtttcaaaggtaaattttgtttcaatatatggatataatttatcaagacgtctttgcccttttttctttcttacttgtgtggaaaaatcccaacccctgttaatgactatgcattcttctacttaagcaaacaatatggctggaacaaaccccccacacatgcattccctcatacaaccatgtttattagttatacttatcttacatttggattgcagtcatcataaggtcattataattgtacagaaatttaacctccttatatcttccattcactcttctatttgagatggctcttttctgcctaaacaaccctctttttctgttcttgaatccttatacccccatcatcatactcagaactaatacctactccttattcaactgagaaaatacatgcaattagaagagaaattctacactttcccatcaccaaatctaccaaactattaagtattttagtatgtttccatgagtcagccttcccttctcttatgctgaatgaattgcttctgttcatttaaggacagggccttctctttgaccatattccctcatactttctcaaagaacttcttcttgcatttatgctctctcttttctgtatcaccagttttctcctgttaacataattttccaatcagcataaatacatattcaatagctcccccaaaaatgtctagtcttagtctatctcaccctccatttcctaccttatttctctgtttccatttaaagcaaaattccttgagtttctctacttcctttcttcatttctttcaaccagtcaggctcttctagccccctatcctctgaaaatacaatgcaaaagtctacccacaccagtcaggctattttatttttatttttattttttgtgggtacatagtaagtgtatatatttatggggtacatgaagtgttttaatacagacatgcaatgcataataattacattatggaaaataggctatccatcccttcaagcatttattcttagtgttagaaacaatcttattatactcttagctatttaacaaaattaacttaaattacttttgactatagacatctttttgtgctatcaaatggtaggtcttattcattcattctaatttttttttgtacctgttaactctctccatctccctcacagcactccacccccatccctacactctgcttcccatatctgatacccatgattctactctctacctccataggttaaattgttttgatttttagatctcacaaataagtaagatcatggggtgtctgtctttctgtgcctggcctatttcactgaacataatgacttccatttccatccatttgttgcaaatgactgtatctcattctttttacagctgaatagtactccgttgtgtataactgccacatttctttttgtccattcacctgttgatacacacttaggttgcttccagttcttgcctattgtgaacagagctgcaacaaacatgaaagtgcagttatcgctttgacatactgatttcctttcttttcagtatatacatagcagtgggattgctggaacatatggtagctctatttttagtattttgaggaacttccaaactgttctccatagtggttgtattaatttacacttccaccaacagtgtatgaggatttccttttctccacattctcgctagcattttttattgcctgtcttttggatataagccattttaatgggagggaaagaatgtactttctgaggctacagaaaatacatccttttcatatgcctatttatcattttgtgtctccttttgagaaatagctattcaaatttttgcccatattttaatcagattattagattttttcctgcagagttgtttgacctccttatatattctggttattaatcccttgtcaagtgagtagtttgcaaattttttatcccattgattgtttcctttgctgtgtaaatgcttttcaacttaatgagataccatttgtccattttgcttgggttgcctgtacttgtgggttattactaaagaaatttttgcccagatcaatgtcctggatgttttccctaatgttttcttatagtagtttcataatttgaagtcttagatttaagtctttgcctatattgatttgatgtttgtatatggcaagagatggggtctagtttcattcttttgcatatggatgttcagttttcccagcatcatttattgaagaaactgtctttttcccagtgtatgtttttggcgcctttatagaaagtgtgtttactgtaggtgcgtggatttatttctgaattctctattgtgtttcattggtctatgtgtctgtttttatgacagtactatgctgttttgtttgctatagcattgtagtacaatttgaagtcaggtaatatgattcctccatttttgttctttttgcttaggatagctttggctactgtgggtcttttatggtttcatacaaattttaggatagttgttttctatttctttgaagaatgtcgttggtattttgatagggatttcattgaatctgtagattgctttagggtagtatgtacattttaacaatattgattcttccaacccacgaacatggaatatctttgcattttctggtcttctctttagcttttctcattcgcattttatagttttaattatagggatctttcacttctttggttaagttaattcctaggtatttaattttatttgtggctattgtaaatgggaattctttttttttttttagattgtttactgttggcatctaaaaatcctgtagaattttgtaggttgatttttatgttctacaattttactgaatttgtttatgagttctaatagttatttttgtgttttggtggagtgtttaggtttttccaaatataatatcctttcatctgcaaataaaaatagtttggcttcttcctttccaatttggctgccctttatttctttctcttgtctgatttctccagctaggacttccagtactgtgtagaataacagtggtgaaagtgtgcatccttgttgtgttcagatttcaggggtaaggctttcagtttgtctccgttcagtatgacactagctgtgggtctgtcatatatggttttaattatgttgaggtatgttctttctatacccagtttttgagggtctttatcgtgaggggatgttgaattttcagcatcaattgcaatgattgtatggtttttatccttcagtctgtttttatgatgtaacacattgatttatttgcatatgttaaaccattattgcatcctaagggtaaatcccacttggtcatgatgaataatcttttaaatgtattgttgaatttggtttgctaccactttgtagaggatttttgcatcaatattcttcagtgatattggcctatagttttttattttctatttatgtatttatttatttatgatgtgtctttgtctggttttgttatcaggataatcctggcctcataaaatgaatttggaagtattccctccacctctgtttttcgaatagtttaaatagtttgagtaggattggtattagctcttctttaaatgtttggtagaattcaacagtgaagccattgggtcctgggcttcattttactggtaagctttttttttttttttttttgaggcagagttttgctcttgttgcccaggctggagtgcaatggcatgatctcagctcactgcaacctccgcctcctaaactcaagcaattctcctacctcagcctcccgagtagctgagattacaggcatgcaccaccattcccagctagttttgtatttttagtagagatgggtcaggctggactcaaactcccgacctcaggtgatccacccaccttagcctcccaaagtgctgggattataggctgaaccaccgtgactggccctgggaaccttttaattatggctttaatcttgttacttattattgctctattcaggttttgaatttcttcctggttcaatcttggtaggttgtatgtgtctaggaatttgtccatttcttctagacatagtagctcatagtagccactaatgattctttgaatttctgggatagcagttgtaaaattttctttttcatctctgcttttatttgcaatgtctctgttttttcttagtctgggtgaaggtttgtcaattttatttaacttttcaaaaaaatagtctttcattgcttttttatagtgttttcttcattttaattttatttatttctgcttgatctttattatttctcctctgttggtttgggttttggtttgttcttgtttttctagttctttaagatgcatgattacattatttatttgaagtttttcttcttttttgttggagtcacttacagctataaacttccctcttcgtactgcttttgctgtatccagtgtgcttcagtatgttatgttttcattatcatttgtttcaataaatttttcaactttctgcttagtttcctcattgactcattggtcattcaggagcatattgtgtaatttttatgtctttatatagtttccaaattttctcttattgatttctacttttattccactgtggtctgaagagatgcttgatattatttcaattttttgaatgttttaaaacttgttttgtgacctaacatatggtctatccttaagaatgtttcatgtgctgcagaacagaatgtgtattctgcagcaatttgatgaaatgctctgtaaatacctattagctccatttggccgagagtgcagattaaatttgaattttctttgttttccatctggaagatatttccagtgcttatagtggggcgttgaagtctcccgctattattggattggagtctatctctttaggtctaataatatttgcttcatatatctgggtgctccagtgttgggtgcatatatatttaaaattgttatatccttttgctgaattaacctcttcattattatatagtgaacttctttgtcttttcttacagtttcttcctgttttccttttattgaagatgattttgtctggtgatatgatttagtttcttgttttttattttttgtatattcattatatatttttttgctttgaggttaccatgaagcttgcaaataccatcttataacccatcattttaagctgataacaacttaacatcattttcataaacaaacaaacaaggaattaaaacttataaagacttgatgccataacttcatacccgttttcttttaacttttttgttactacttatatcttattgttccatttttcttgaaaagttgttttagttattatttttgattggatcattgtttagtttttgtacttaagagtagttcataaactgtgattacagtgttgtaatattctctgtttttctgtattctcactattcagtgagttttgtatcttcattaacatttcttattgctcattaacatacttttctttctgatttaagtattccctttagcatttcttgtgggaaaggtctggtgttgctgaaatccctcagcttttgtttgtctggtaaaaggtttatttctccttcaaatttgaaagatatttttgccatatacattctaggaaaaaatatttttgccttcagcactttaattatgtcatgccatgctctcctggcctgtaaagttcccactgaaaagtctactgtcagatgtattggaactcaattttctgttatttgtttcttttctcttgctgcttttagcaccctttctttatccttgacctttgggagtttgattaaatgccttaggagtcttctttggattagatctccttggtgttctataaccttcttttacttgggtattgatatatttctctaggtttaggaagttcgctgttattatccctttctactcctatctttttctctaccttctctttaaggctaataactcttagatttgccctgttgcggctttctagatgctgtccatgcacttcattgtttttatttttttttcttcgtttttctcctctgactgtgtgcttccaaatagcctgtcttcaagcccactaattctttcctctgctttatcaattcttcttttaaaagactctgatgcattctttggtatgacatttgcatttttcagctccagaatttctgcttgattctttttaattatttcaatgtcttttttaaatttatctgatagaattttgaattccttctctgtgttatcttgaatgtctttaagtttttttcattcagatattgtgaattctctgtctgaattcaaaggtcacatatctctgtttctccaggattgttccctgatgtcttatttagttcatttggtgaggtcatcttttcctggatcatcttgatacttgtagatgttaatgtgtctggccattgaagagttaggtatttattgtagtctccacaatctgagcttgtttgtatgcatccttcttgggcaggctttccagatattcaaaatgacttagttgttgtgatttaagctgtatcttccttatgggggacctcaagttccctaatgctgtggttcttatagactcatagaggtactatattgatggtctaggtcaagatcccaaagaattctctggattaccaggcagagattattgttctcttcccttactttctctcaaacaaagtccctctgtctgttctgagccacctggagcagagggtagagtggcacatcacccctgtaggcaccacccatagcttgcactgggtcagacctgaagccagcacagcactggttctcacctaaggcctgctgtaaaccattccctggctcctgcctatttttgctcaaaactctgaggctctacaatcagcaggtagcaatgccagccaggcctgtgttctttcctttagggcagtgagttgccccaggacctagatcggttcagaggtgccacctgggagccagggactagagtcagaaaccttagaagtccacttgttgttctattgtactgtggttaagctggcaactcaaataaggagatgcagtcctcccatttttgcctcccctttccaaaggcagaagagcctcaccatgtggccactgccacttcaggcctatggggagtactgccaggctactgccattgttccctaaggcctaatggctatttaatcagcttctagtgaatgttgtcaagcctgagactcaaccgtcatggcagtgggcttcctctcttccccagagaaggtccagaaatgccatccaagagtcaagtcctagaatcagagacctcagagcccacttcatgctctaccaccctgtggctgagctggtacctaaggtgcaagacaatgtcccctttactttttcctccacttctctcaagcagaaggagtctcaccctgtagccaccacagctggaaatgtgctgagtctcacctgaagccagtaagtctcagagtctcactcaatgttcttaatgtagtacctgggtattgcttctggttattattctggttattcttttgttaagggcatgttacaaatcttgccatgactgagttcttcccttcaaggcagtaggttcctttctggtacatggtgtttctagaaatgtcatcaggaagctaaggtctgaacaggggctgtaagactgactggtgccctatcctgccctggctgagctggtatccaagaggcaagacagagtcctccccactcttccctctctgatcctcaagcagaaggaaggggtctcctttgcagccacaaactatgcagcctgaggttagtggaaaggtgatgccagcagtcccctagcagtcctggctggtgtctcagtaggtcatgaccccctctctccctcagcccacactgactctgggcccagagcactttagctcatgatggcaaggcttgggggaactgaagttccaaacactgggattggcaattctcctttgtgtggggcttgtttaaattctccctccttgggcgagcgtcacctgagtttggcctggttttgctttctgctattaacaagggcagcactgagttcaatgcctcagaattgctagctcttactctccccagtgcacagcaatgctctcagaaacaccaggctgcctctctgagcagggttgcctctactgagggatggcggaggggtggggtctgagattcaagactgtttttccagtgcctctttccgtggtatgaaggtaaaaccaggtagtgtgagtgcttacctgatttttggctcttatgaaggtgtgtgtgtgtgtatatgtgtgtgtgtgtgtgtgtgtagatagttgttaacttggtgtcctcactggggggacaattgagagagccttctattttgccattttgttctacccttctccccagtcaggctattttagtccctgtcttctgaaagtgcaatgcaaaggtcaccagttatctccatgttctgcaactcatggccatttttcaggctttctttttgtagagctctcaatatcatttaatcatgttttctcttaataaaaacatacttcatttggataccagaagggcacactttgtggtttttatttgacctcagtggctggtttttttttccccccccggagtcttgctctgtcacccaggctggagtgcagtggtgcaatctcagctcactgcaagctccgcctcccagtttcacaccactctcctgcctcagtctcccgagtagctgggactacaggcacctgccaccatgcccagctaattttttttttttttttttttgtattttcagtagagacggggtttcaccatgttaaccaggatggtctcgatctcctgacctcgtgatccgcctgcctcggcctcccaaagtgctgagattacaggtgatggctgttttttatctatctctagcttgctcttcttattctgcctcattcataaatttggcatgcttttaggctcaattatcatttatctatttacatatacttcttaactaatctcataatgtgtgagctggttactttataagtcatgtctctattcctaccctacctaccagatcatgactcatgtatccaactactagctcagcatctcatctttgctgtctggtaggtatctcagaactaacatatccaaaacagaagtcttgacaggtagggatactcaccgctatactaataaggaaaggcttcaaaacaaaagtcttgaattctgcctttcaaactttgctttccccaagtgtctctttcataataaatggcactatgattcactcagttaagaagaaaaaaaaaagtagcagctgtccttgaattttctttctgttaccctcaatattcatccatcaattagactggtcaggtttcccttagaagtatgaatcaagcaagactgacaagggtctggggacatgacacagttgaaaaaaaaaaagcttgtggcaaaagttaaaagagaagtctcattattttcaagaattggagttaggaggataataatgctaaatctcaggggttggaaagacctggaattaaactggaacaaagagtagagagttcttgttgctattgaggcaaccttctctttctgcctggaagtgttgcatattttctctctgcctgtaatattcttaattttatgataacatgcctaggtctgaaacttacagtttgagatttttcataatcttttttaattctctgaactttctctccataattttatcagttataccctcctctttatgtttttctctatggtaatctcagtatcaagattttggcagttttatttaatatatcttggtatttatttagtatatttatttacttttttgtagtcatctaggagaatttctccactttatctttgaactcagtaatacatccgtaagctgtacacacagttctccaatataggccatttatcattgctttaaaaaaatctcagctattatatttcctactaatattttccatgtggttcacttatcgataactcatttttttcctcatttacaaatatctttccctttgtttttaggcatattgacatatgagatactaaataaacattttaaaagatatgaaaaaataaatgattaagtcaatcaaatgaagattctgtcacagatggtctagtgctcgctttatgaatttctcagaggctgcctgtcatagatgatataaaagacatgtctgattaagtgatgaattgaattagatgctaacataatttcattctgttcttaggatttgtttccataaaaagcttaaataaagaaaatgtctctatttccttactagagtccatttatctttcatatttggtatcagaacaatcaacagcgtttgcttgacttcaatgaaacttttgtctgaaaatatgtatgactgaatcaaattgttcactaatttttattgctttaaggatatatattattttaacagatttcttttgtttagtagaactgtctgtcagagaatgatctttgatgtcattattagcttgtttacagtgttttctttgatgaaattattcattgtttttatttgtatagtttgttcataatattgtgtgatatgtgtaataaaggaaaagtatagttttgttactcagatgactggataaccttagagaatttccttactctaaaaatatcttcaaaattattaaagattatttttaaaattgacatacactttaaataaagttgggagctaatatatgtgtctgtaaatcaataaagtgtatatgatttcataacttgatttgctcatttgatttgtaattcaacatatattaactatagatatgtacttgatactagagaagcaaagataacaccattattttgaaaaaactagatttattcacgtttctaggacatcttttgcaattcatttgagggaacagtttttatagtgaaatgaaagcactcattagtgtgagagaatgagaaggctagctccttttcagtggatattttgaaaggaaaatttgaaaattagttcagtgaaatagattggggttagttgccagaaatctttccaaatatgattgagtagactgtcaaataaaaaaacaaatctggacttaggtacgagagactttattggaaaggatgtttgcaacgaggggaggggggcaattgcaataaggaaaatatgccaactataagatcagcaagtgtctcaaagggtaagcagtgaagtgttttgttttgttttagggaatagtaagcaagactagaaagaattgggtgtaggaaagtaggacaaatgagggtggtgcgattagggataggagctcagagaatgaggtaccctttaaaacatagtcagcctgttattaggagaggatgtaaatgaagggttgaggctgctgaggctgaatatggattagagtttaggggcctacgggaaggcgtaaagcttaactaaagtttgattaagtcgatgtagcaaatattttgtccagtttggtcagtggcccaaacagttcagctaatcatttatgaaggaaataatggcattttggaggtctaggcctggccttgtcatagggacacaagggaagtgtcctgcatctcatctaagttatatggggaagggttccttgcaataagctgtttctggaacacaaaggtgtgggataatttcttttaacttttgcttgttttccgggatcacaagtgcattagtccattctcacattgatataaaaagatacctgaaactgggtaaattataaagaaatgaggtttaactggctcacggttctgcaggctgtacaggaagcatagtggtttctgcttctggggaggcttcaggaacctctagtcatggcagtaggcaaagggggagtgaggcatctcacatggtgtgagcaggagcaagagagagtgaatagcagtggtgaaagtgtgcatccttgtgttccagatttcaaaggaaaggctttcagtctttcttcatttagtatgatagtagctgtgggtctgtcatatatggtttttattatgtagaagtatgtttcttctatactcattttttatggtttttatcatgaaagatgttgaattttatcaaatgcttttttagcatctattgaaatgatcgtatggtttttaatcctttgatctgtttgtatgatgcagcacactgattgatttgcctatgttgaatcattctttcatcccagagataaaatcccacttgggattcatgatgaatgatatttttaatgtattgttgaatgcagttcgctagtactgtgttgaggatttttgcatcagtattcattagtgatattggcttatagttttctttttttcagatgtgcctttatctggttttagagtcaaggtaatactggcctcatagaatgagtttggaagtattctctcctcctctattttttggaatactttgggtagtattggtattaattctctaaatgtttggtagaattgagcagtgaagccatcaggtcccagggttttctttactgtgaggctttattacagctttgatcttgtcacttgttattgatttgttcatgttttgaatatcttcctggttcaatcgtgatacattttatgtctctaggaatttgtccatttattctagatttttctaatttattggcttgcagttgctcatagtagccactaatgatcctttgaatgtctgctgtatcagttgtacagtctccttttatgtgtccgatttgatttatttggatattttctctttactaattttgagtttgggttgctcttgttttcctaatttttaagatgtatcattaggttgtttatttgaagcttttcttcttttttgatggagtcacttatggctataaacttccctcttagtactgctttggctgtattccataggttttcatatactgagtttccattgtcatttgtttcaggaaaatttccaatttccttctcaatttcttcactaacccactcatcattctggagcatattgtttaattttcatatatttgtatagttttcagaattcttcttgttattgatttctagttttattcagttttggtcagagaagatgctagatattatttcagttttttgaatattttaaactgttttgtgatctaacatatgatctatccttgagaatgatccatgctctgaggaaaataatgtgtattctgcaatcactggagtaaatgttctgtaaatatctgttacctccattttgtctagagtgtagattaagtttgaagttgctttgttaattttttgtctggaacatcggtttagtgctaaaagtgggatgttgaaatctccagctattattgtattggagtctaactctatattttaaaaattgttatatcctcttgctgaattgaccacttcattattatatagtgaccttctttttctcctttggtactatttgccttgaaatctattttatctgaaataaatatagctactcctactcttttttggtttctcttggcatggaatacctttatacctttattatcagtctatgagtgcctttataggtgaagtgtgtttcttataggcaacagatcagtgactcttcccaccaccgcccacccgccccaccttgtttagttagtctatgtcttttgattggagagtttcgtccatttatgttcagtggtattattgatgactaaggacttactcctgccgttttattatttgttttctggttgttttgtgatcttctcttccttttttctttccctcctgtcttccttttattgaaggagattttgtctggtgatatgatttagttttttgcctttcattttttgtgtatcccttgtatgttttttggtttgaggttacaatgaggcttgcaagtattactttataacacattatcttaagctgataacaacttaacactgtttgcataaaccaactaacaagcaaaaataaatgaaataaaaactctacatcttaactatgtccctgctttaactttttattatttccatttatatcttattgtactatgtccagaaaagttgttgtagttattatttttgattgtttcatggtttagtctttctgcttcagagtagtttacacaccacagttacagtgtcacagtattctgtttttctgtgttcttaccattacctgtgagttttgtatctttggtgttgcttattcctcattaatgttcttttctttctgactaaagtacttgctttagcatctattctaggacaggtctcgtgttgatgaaataactcagctattgtttgtctgggaaagtctttatgtctcctttatgtttaaaggatattttcactgtatatactattctaggataaaagatttttttcctttagcagtttaaatatgtcatgacattctctcttggcctgtaaggtttccactggaaattctgctgccagatgtattggaactccattgtgtgttattatttatttcctttcttttgttgattttagcatcttttctttatccttgatctttgggagtttgattattaatggccttgagattgtcttctttgtgttaaatctgcttggtgttgtataaccttctcgtacttggatattgctctcttactctaggtttgtgaagttttctgatattatccttttgaataaactttctactcctatctctttctctgttccctctttaaggccaattaacacttagatttgctcttttgaggctattttctagattcggcaggcacgcttcattctttttaattctttttttcttttgtctcctctgaccatgtatttttcaatagcttggcttcaggctcattaattgtttcttctgtttggtcaattctgctattaaaagactctgatatgttctttaccatgtccattgcatttttcaggtccagaatttcatttctgcttgattccttttaattatttcaatctctttctttaatttatctaatagaattctgaatgccttctctatcttgaatttctttgagtttcttcaacaaagctattttgaattctctgtctgaaaggtgacacatctttgtttttccaggattgttttctcatgcctgatttagtttatttggtgaggtcatgtttacctggattgtcctagtacttgtagatgattgtctgtgtctgggcattgaagagttaggtatttattgtagtctttgcagtctgctcttgtttgtacctgtccttcttgggaaagcttttcaggtattcaaaaagacttggatgttgtgatctaagttgtatctgctttgggggggaccccaagcccagtaatgctgtggttcttagagactcatagagatactgccctgatggtcttggacaagatctgaaagaattctccagatcaccatgcagagagttgacctcttctcttcttcttttctttttctttcaaacaaatggggtctctctttctctctctctctctctctctctgttctgaaccaccagaagtagggtggagtgacatactgtgttgggtcagacctgaagccagaacagcactggttcttgcccaagacctgctgtaacccctggctattgcctgttttctctcaagaccatggggctttacagtcagcaggtggcaaagccagctaggcctctgtccttccattcagggcactgtgttatcccaggccccaggcaggtccagagttgcctattggaagccgtgaactagagtcaaaaccacttagaagtctttctggtgttctattgtactgtggctgagctgaaaccacaagacacagtccttctcaatctttcatcccctttccaaaggaaggtatgcctcaccccatggcaactgtcactacaggcctgcagtgagtactgccagcctactgctgatgttaccttaaggtccgtgggctctttagtcagcttgtgctgaatcttgccagtcctgagactcacccttctgggcagtggactcgcctctggccaaggacaggtccagaaatgttgtgcaagagcccagttttggaatcagcaaccccaagagacgagttggttctctaccccactgtggctgagctggtatctaggtgcaagacaaagtcccctttacttttccctccacttttctcaagctgaaggagtcttgccccatagccaccacagttgggaatgtgctgagtctcacttgaagccagcaagcctcagagtctcacccaagtttcttgatgtaccacctgagtattactgctggttattcaatgcccaagggctcttcagttagtaggtaatgaaggctactagtactgagtttttcctttcaaggcaaagagaaaggattatcttctggtgcaagatgtctagaaatgttgtattggagctagagcctggaacaggtacctgataactctgacagatgccctaccctgctgtcactgagctgctatccaagatgcaagacagagtcctttccactcttccctcttctctccttgaatggaaagaaggggtctcttttggagcttaattgcctcagcttgtgtctcagtaggtcacgtgccccagcattctactagctctggacccagttcatcactaggactcacctaaaacttgcattgcttatggcctagactgcctttccagtttatttggagccccagaacactttagcccacagtggcaaggcttgtggtaactaaagtttcgacagctgggatcagacatatccctctggctaaggcagttttaaaagctccctccatggccaggggtcagttgagtttggtgtggttttcctttttgttataacaggataacactgagttgaacgccttacaattgctgtggtctcccttccccagcactcagaaatgctcctgctgagggtaggagaggagtgatgctggtgattcagaactgttccttctaccttttcagtgcctctttcagtgatactgagttaaaaccaggcactgtgagtgctcatctgatgtttgattcttgtgaaggttcttttgtttgtttgtttggatagttgttaaattgatgtctttgttggggagacgattggtggagccttctattctgccatcttgttctgcctcccaaaagtaacaattttttaataatagggaaatgattcatgcatgtgtttgtagtcactaaaacaatatttgtgaaaagtttctctataaagaaggatttatgttacaccataaattgagataaagtcaatttacatagaattgtatttcttaacttattcacattaaaattttaactatatattttatttcaattataaaagtacattaaaacatgcattattaatacataaaataaatagtacattgaatgccaacctagtgtcacgtattgtattatacacgttggggtactgaacaaagtagctagtatctacatactttctggtggagttgtaagacgtgttttacaaaaaaagtgtagagtgcacattgcatcaaataaaatgctaagaagtggggtttggatagttaaattatagtttatttcaaaagaatgacttatctgatatatatcgacatttatatctatgcattttgtgagcaagcaaaagtgcttctggtgttttagagtcattgtattatcatgtcattatatatcctccatgtttgctccaatgaactttatataattatgtgaagagtttttttttgttgttattcttgttccatttatatgcccccaagttgtttatattttatttttttaatttaaaagccacgctattgtttaattttaagaatttttaaatcatatagtattaaactcctttttttatatttcacaatcttcttttgttgaaaatgtccacctcatagtgatgaaatttgagtagtggacaggtatattaaattttgtctgctgattaataaacttcatagtattttgttactttatttttccagagaagacagattttacatttgcatatattacgttctttttctactagtttatttttattttttccttatttcttcaggatatgctcaataaataaccaggtctgttaagatataggtgaaaagtgacttttgaaatgataccaaatatattatattctctgttgtgttgtattccattatgtatatacagtctgatggcaaaatcctcaaaagaaattaagggttttgaaaaaaaagagaagtacagtaattgaaaatgcataatttcttggtctattggtataatatgtgtgggagataaacagccagcctcttgaaaggactgcagtagaactagtttgctcaggcaacaactaggtttcaagaagagcggcagagtggataaaatctttagaaaaaatgcgagtgcattttgataatgatttactgtgaatgccagatgacacagtgaaatgtttccagatgatgggagaagtgaaagatgtggttacagaatgtaatgcattagaattagattctctgagtgatgagagtaacctgagctgcttatgttgactcacatacttcggaataaagaatgtgataaaattatgaaggtctcctagcaggaagtggtggtgagactttgagacttagagtggaatgggggaagctatttccagaatcatgcagagcttttggtctctcgtgaatttatctctaacagctgagacctctaggcaatagtgggcagagagtggggaaagttttacccagaattcagttactgtcttgtcatctgaagatggaacacaccaaactgggctcttacaccaagcacatgagtttcctttgatttctgttgaagcaggtctctaggttatcaaggaagaacattattaaacagttttatttaatgtggttgaattctaaaaatgaaaaaaatgcaaatttttaaaaaatagcaaaatattttaattctaaaaagtatttgtgttaccctgtaatatacctgtaacactagtcctcacagaagataaagtagaagtgaaaggctatcttaatgtcaattcatgaatattctgttgctagagcagcaaagttatttctgagtgttgtatcagtaagattaactattttgtggaccccaaatatagattacaatgcagtaccaataaatatttaatcataactttcttcttagaccttaatgtgaattgtctctgagtctctgagggaattactccagaaatctttttgttgttgttgttttttacacgaagtcattaaatatataaaatggaaatatctcaattggacaacagtacataaagtcctttacctaagctgctgaatttgatgtgtaaccctcatagtgaatacactacagaacaggtattaagaggacctcttggatggataaataatgcatataaaaagagcactaaatttagatcccatgctatatctaagacaaagattgtagctaatatcttctgagctcaatatgtaccaaatactgtgccaagtactttcatacctttcctaatgtgtaaaacaatcttaagtggtaggtaattttatcctatgttttaaccactgctcctagtatatcacctgtctttgtgactttgtaataaacacgaaactcttctgggcctcaggtaaataaaaagtaaagtgtttatatacacacctcttgtcaacaagctgaggaaaaagtattgatctttcttctccttaagtttgcaaataaatatagttaatgatggatatataatagaaaaaagacaaaattgaagaacttgggaggaatttctgtgagacattcctatctgcttgtgccactcacgttattaagtacttgtgttttttcttacccaatgtcctttgaggcattttagaatattgtttgtaaatatttttaaaaatttaaaaagcctttataattaaaaccacattagcaaaagagaggtcagtcaacagtcctttgtttatgttttaatattttgtcacttttacaggatttaagtcgtggaactgaacatttatttggctgatcctcatcatgaaccgtgcttttagcaggaagaaaggtaagtgtggtcattttttaaaacttgggagtcaagccaatgttgctatgaacataagcagcgatgttaagaaatcagtttttcttgttgtcaaaccacctggcccagaaatgaagttagattagagcaacacaaatctgcaaacgttgctaattagctttccttagttatcaccctagtgaaagatcaaagttgtttattacactgagttcacaatacatatgtgataatatgtcgcctggcaacttgaagcttgttgtgaaattgcaaagaataaaatgatctgaaactttgtcctaactttagcttatgtagccatataatactaaattccctgggcttacataagattatggtaacataaattcattcataattgtgtgtgtgtgtgtgcacaggcttcatgtatcattgaacaatatgtgaggattggtagtagatagattgaaagcaatgaggccacaataagtttgttattaatttttaggtaggaatttaaataactacgaatgtagtatattatagtgatcactataggactgaaagaaacagctagttagatgttgttttttaatgggcagaaaaacatggcatttgacaaactattttatgatgcacttataaagaaagatagaaaaataaatataactttgcgtaggtcagtgaagtttaaataatgtatcctttccattctcaaaggagttctctagtggagagcatggggctctctcctgttttacattattgatgaattggggaagaatgcttaaataatgataatcaaattcataggtgattgaaagcaagaaggtgatgatacatgaatgctgtagtaggattacagatgtgtgaggaaaaaatgacaagttaggccttattccacactataaacttactaagatactgcaaattgtcaaacaagggcccagaaaatctaatacttttatcatgattcaaatattgctgttatttggaagatgcatcttgaatgctgtcagagtaaaaatggctgaagaataaagtcaacagtgtgagtatcaaaggctctgtgtcattttctaatgtatggatggataatgaatagtccagaactatgactagtgttctgttcagtatcaggcagttgggcactgggtgttctccctttaaaaggttacagtgttaactgacacatagtaacgtgcccagatgagaaagactgagatgacttcaggactttcagccatgtaacaggaagcatgactgagaaccattcatgtgttaatgagagctgtctttcaatatttgaaggactgccatttagccatggggttgagtttagtaaaggacaaataggtgtaaatgataatgtcactgatttaatatagggaaaatgaattccaagaaagtcaggtaaatgtttaattaaattactcaaattactagctttttttggtctctgaagtgagaggtgttcaaacatttggatgtggcagagaagattaatgtattcagtgagaatttagataatgtgacctttaaggcactcttcaactctgggaagctagaaatttattattttacttaattttcctgaataaggggaaagcaaaatgacattgattatagtctgtagctgcttctgatttacaacaggtaccaaaagtaaaatagtgtttctttcatttttactagtaacaaaatctataaataattacatgatatattgaagtttttgttttgttttatatagagataggatcttgctacgttgccagggctggtctcaaactccaagcatcaagtgatcctcctgccttggcctcccaaagtgttgggattataggcgggagccactgtgctcaatctgaagtatgtttaataaagtaatagaaatcttacatcacaacttaacactttaatcactctaacttatttttaataaatacttctagaccttctttttatatatatatgcttataatcctcctttcctatcactttaaagttgaaactccacatctgtaatttactgtttatttgaagggggtttagaatggtttttcattgagaaatcccaagagttggatagtaatgtgagtaaccagtaattgtatatttgtcttatttgaacacagtgggagtacaaccataggaatagtggagtgatttggagaatcaagaagcagaagcacttgttatttcctgatttgcttcattctctttgaatttcttttgacttctcttatttttcaggtctaatgatttagtatcatgaaattattcactaatattttactccaacctgaagttaaaacttgaactgaaaattttcccttaagttcaccagtcaatcctgactctatcatttggtgaagttgttaaagaaaaaattttaagagcccccgctcctggtttcaatcaataacattatttcattaaattttaatttcagatgaaaaacttaaattgtttgagagaatttgtatatctggataagctggagccataagctataattatatcactagagaatattttatttaagtcacgtttccaaaactaccatcaacataccctgtgtacagtatcctaaacaaagcaaggtggtcttctatcagtaaaagcttatctctttatttcatagatacccaatatacttggccatcacatgtaatcttactaaatgatccaggacctcagaagcctaaggaaaaaagaccatcttaaacctaaacataattgtgttttttttttaaattaaatctccaaattagtaagtttgtatttcttgattgaattcactgattttctttgcagatgctctaatggtgttagagttactcagagattctgaagagtgctgaatatattacagtcatatcattttgagctcttttgaaaagatctttaaaaattagtctaatataatcatagacgaaattttagtgattgtctttgttttagattttttcccaatgttaattttcttttaattaaaaaaattttatattctatttattacatcaaatataaatcattaagtaaaaaagtataaaaataacatgtgaataaatgattaagtaattcaactagttacatttttttaaacttagttgacatactattgagtagatatcaaatgcacagcacttaaaatttaatatttaaatgttactttcttttttaacaaacattttattcaaatgtatctattcattaaccagcatttagttttaaatttaatgtactcaaaagtaggtgtttcaccattgtaagctctgatgatacaaaaataatgaatttactctatatttcctgatgagttcttaatctagatgcattttgaaaacctaaatttattgacccagcaatcagagtacattgatatttgtcaaatatgttgaaatgttggcattttccttcatgtaagtcttcaattttgagttagtgattttactttaattcaaggaagaggaactctttctagaatgtctatattcccatttctgcacattttcatatatctaataccttctatgaacacatatagtgaccaaggaccagcatgtgtatttcctactcaagatttagtcctatctataagttaatataaaaagttttattttgtcatttttttgccaaagtataaattaggatgacagtaagaactcattttggaaatccttcaggttttataaatgtactgctcatacctgaggatatgtaataaacaaacactaaattatcagtgcttgataatatggatgcagatttttgtcattgtaggagctacagcttatccactggaatttaatattgtgattattttagtctgtcagcagaagcagcttggtatactctttttaggtcgctgcaatatgagtctgtaacagaggcattttcatcagttttcaagtaatagtggtttataggagaaagaaattattaatacctctctgcctcaggattggtgtgacccatcatagtgagagtttagtcagcgtttacatactcctgagatgtgttgtatgttttggaaaggagacatgaaaagaattaagtgaaggagttaaaaggagaaattggacatcttagttttcctaaaggtgtttttcttgttttgtgttttattgccttggaagaagtattgtgatttacttcttttaatgtataaaagcaagactatattccaaatctaagtgcaaattattcttgaattaatcatattactatccattagcaatcacaaaaagtatagctaagatgacaatccttatagaaaatacaaatttcacacattaaatgtcaacgtcaatattttttgaagcttagaatgtattgctgttcaaaatatttcacccaagtatggctatcatatattcactctagtagtcagaaatagacccaattctcttggcccttcatcttttgtattggaaatacttgagaatattgcattgtaccccataaacaaatttaatatgaatacagtgcattattattcaaatagtataaaataatttacattccaaaaatatgtgtcattttctctatgtcttcacattaacccagtttaagaagaacatattaagggtatcaaattagtttctgttaacagcatttaaaaaaatccaaatttaatgttgaaactactttgttagtaatacaatatttccttccagtttgtatttgtatgtttcatggtaaaataaatctttgattttgttctatttataatactgattccaaattttaaactcccgtgaaaaataagatacgtacaaaactacactaatggaggcaaaatatcattgaagattgagaagtcttactccacataagtgcagattcaaaaaaagccaatctgtttcatgtaaatgttaacatttttttctccccattatgcattcctcaaaatattggggaaaatatgtgggctatattaataaagttcaaaaattaaattgaaaatattagtaatacaaatataaataacaagatataaataatatataatacaattacttttaatatattctatccttttatttctaatatttttaacacttatctaagaaacattttgatttactgcatttgagactatttatatccaaaactcctgagagaagaccttcaatcagtgtttcctcaaatttagaataaagatttatcataatattatattgatttccaaatgaacacagtaagttggttaatttcagcttcatacaaatgcagttgttagtataatatgataatttccctttagaataactaaatcttgatgctacaatataatatttgcaaagagttaaagagcagattatattttattgttctaggaattaagaaaaataacctataattcatgagagcataaagtgaaagaagaaagatacttgttttaaatcacaaatgaatgcaattactcatagcccactgatgtggtttttatatgttcttttaaaatttggtatcatttttattatttgaaaactttaaaaagaaaagctagggatttttataccaaagaaagaatcctataatcacgccccaactaaattgttcttctatctgagtggttattctttgtcattttggcaaagaatctcagaattagaaatactctgtgtcctaaattaccatacaaatggtaatgcgtgaatatgacaccatggaaacctaaaatttaactctgtgtattttttattgcagacaaaacatggatgcatacacctgaagctttatcaaaacatttcattccctataatgcaaaggtaaaaatagttcatttattatttaattttattttgttatagtatcattactaattcatggctaatctcagattgcttatgtattgacatttcctggttattgattcctgaaaaaagtttacataaataaaataattgtggcatgggaagttatttttctctgtagaatagtttctctttttaaaagtgtattatttaaaattactgttttagtcaaacgtgttttcttcaagtgatttttgttattgttaaaaacatttgcaatatcatggcttgtagaaactcaaaccactaacaaattagctttctttaaaaacattaatgttacattatacaacctaaatataaaaacctgcaaatgagagaaatgagctgcaattttcataaatgtaattatcattcaagaaaaaaggaacaaagtttaaatttttattttattttattttattgagatgaagatgtgctctgtaggccaggctggagtgcactggggagatcttggctctctgcaacctccatctcctgggttcaagtgattctcccacttcagcctctggagtagctggaattacaggcatgtgccaccatgctttttagaagagacggggtttcaccgtgttgcccatgctggtctcgaactcctgacctcaagtggtccacctgcctcagccccccaaagtgctgggattacaggtagaagccactctgcccagcctaaattatttttaaaaagcacacaaaaaggtgccttttaaaaattcttttgttcaagttgctgcattttaatagagaaatggaaacattaatctacgctctgtgtctttaaagatttcatttgttgttgaaaaaaatgagtgaattcagtttaaaacagagactttaaagaaaggtgctattttgtagttaattatcaccaaacttgtaatagttttcagagagatctgagtcaaaatttcgaagagtcagaaatgagttaaagaggggattggaaatattagcgtcaaatttaaaagcaactgaactttggagacagaataggggaaaacaaaactataatatctttataagagaacttaaacgtttatggattagtgaagtatacactgggatacagtgagattaggcatagcaattatttcaggaaaaattaaagaatgtttattgaggagaaaattaacggtgtttggtaggaaacatctagagttcttacctaagtctgaatcagaaggaagaaacatttaaaagcctatgtagaagaagttcttccagagctgttgttcagcagcgaaatttggagagtgcaccatctcttatttttttcttgctgacttaccagcaaagaaatctgaaatattttctgtgtaaacatattatacttgaaatcactgcagtgcttatgaatttttctataaacttaacataaaggctgattgccctaatttagcatgaaaagtttagttaactgaatgagaaaaattgtttatgttatccatcatttccacagatattgtttgtattagctattggtatactatatgaaatctatactgaaaaaattttaatctggaaagctgctatgattttaaaatgcatgctcaattttttatattatcaatcatagtggaattatatgctccagttgaaaccattaatatttttatgtgactgatatgcctcattttgaaaaacagctttataaaagattaaaaggttatattataattagatctacctttaactccgccaatcattctgcttgtctacatggaaaagttgccagtgccaattcacaggtgcataacaattttaagacattctacaggaagtagagggtgcaaaaacatcttcccagactgggaacagtaaaatatggaagggcaggatgattttgtctactataatatggcctcatgagtgataatatatattgtatgtgtaccaagtagcattaaattcatttgaagaatgttagtttttttctgaagtcctttgtttgtggcacttattaggatgacctcatagtagagttactttttaagatatcctgtatctcttgttatagaatatgccacttgaaaaccaaatccttgaccacagaaagtagcttggcacaatagaaaaaaaaatacagactctagagctagattccttggtttatatcatgactccaacacttatttactgtatgcctttgggaaaattgcttaacctttctatgtctgtgattactcatcagtaaatagggatagtaacaatagtaatttctcacttgagttgttatagacataaggaagttagtgctacaacagtgtctgaaagagtggaatttttttctcaggcaaccatcagttctgtccctcagttctgttcttagagccattcaattcactggatctggctcatccagattatccaggataatctttacataaagtgaactgattagagatgttaatcgtatctatgaaataactttacagcaacacctagattagaatttgattgaataactgggcactataacttagccaagttgacacataaaactgatctcatacaagtattaatgatggacaaggttaaaaaggcaaattgggaaggctttgaatggcaaaagcaacagtttggattgtaaatgaatccaacaggattttaggaagataaatcggtagtgataaaaaagtcagtttgaatcaagagtgttagaatgacattaaacctcttaggaagttattttaatggtccaagtatgtggtaataagtttaccatagggtagtagataaatttgcagtggaaaataaagatgtgcttaatattccagaggaagaattgatataaaataggaatggtatataagtagagaataagaaaaaatatctattttcatcctggctaaaagagagactcatcataccattaaaagattcctactacttcactcacttttggcatccactggttacaaattaatctgataaatttaacagaactacttaagaattattattctccctggagaaatatgtaataacatttatgtttaaatgtcttcagttttaaagcattagtgttctgttttattttataattcttttttagaacacattttatttctacattctttcaatttatggaacattgatttcaaaaattcacatttaatattcatagtgtaatgatttgagatcatttgtcgatataaaataataaatggtttaaaataagcattgttctatgtagggttcattagttttggagttttctttaatgtgcagtgacagcattaatattagttcattgggaatcttttatattatcctgtgtactctgtagtgatgtttccaagctaaaggttattacctatgaaaaaatgtggtcatgaaatcaggtagtaggtcatagggacatatatttagagatgggtagcaagggcaaaaaaggtgattgcagttcaagctgagtaggagctagaggagaagagtactgagaatttggatgtattttgaaagtaaagttgacagaatcaatagattaggtattagattctattgctactataattagaatgttaatgcagaaatttaaaaaattctgttcccttcaattttttatgagaatgctaaactctcttttctataaagataaaatgctggcagacttgtattttaatcaatttatttttctgttagagtgagacagtcatttcctagatgaagaattgtgacaaatgtttcattgaaactttttttattgaatgttttattctaaaatgtataattatcccccaaaaagtttaatgtatttatccttttatgaaaaatctatctttaagatatacaaaaatgcaaggatgtttaagaatgaagttataaagagattactaccttactttgcatgaggcagcagtaaagagagtgagtattccttgattatctgtctactgtgttccaagctctaaaagtgagcaaatgtaaaacaaatagtaacacggaccttcaccttaaaaacttatgacgtccctgtggagaggaaacagtcatatgaaacatagaaagaattttggaagaaaagtacataatgataaccaacatcatgtcgttatcttctaaactatggaacatcttaaaatcaaatatagaaatataacgcattccttgcaaaccctttcaaaaccatgtcagggagttttacaagtgagaaaactacatagctaatcaacaacaaaataaaatacaaatgtcaaggagaggtttacaaagaaagattaccttacatttcaaagttttctagaggtgtcagagttttacatatgacacgtgcactgtttgccacttcgtttgtttaatcagagagaaggcttgctggcccagtgagttgtgtggtttctagtgtggctttctcatctttacaacctaaatttgccaacaaaaaaattacctatgagcctttatttgggttcaaaatacaaacaaaatgacaaagaacaaaaacactgccttcatcccctccacacacaaaatatgtaatatcagatgtgacagtaagatattagaacttgaggattctaacccttagttggttgaaaaccacgttggacacttatgtttcaaacttttaactaaacctgcccaatagtaatcctagaaaaatcagaacctacgtatctgacatgctcagatgcacccctcaagagtaagctctataccaacaactccactgattctaccagaattttatagccatatagttgctgcatcctattacagtaattagagcagccatttctgggtcaaactatttgggttcaaacttctcctctctcaactgttatcagaattatgtaacttttctgtccttgagtttttttacttgtaaatgagattaataactacaaatatcaaactggtttgttaggagatttaagtgagttaatatatttttttaaaacttagatcagtgtttggtatgacaaaagtttattgttattaatatagttgttatagaaagtgttctgtcaactctggagttgacactagtcattactatctcttgagaataatgtagcattgaaaaacagagaatgaactacttagaatgtgtatcaggtattttattttttctgtttgcatcaactgaagtacttgcagtgaccactctgaaaggttctatggggaaggaatgctttttcctgaagcacaacaggagactcaatacggccaccttggtggaattatatgcaagagaatgctttgatcattaaagaataatactgttgtgattatactttcctattaccttgaagtaataggagatactttgaggtaacagcattctggaacaaaatattaatgcaaagattgtcctggtcttaaaatcaaatatagaaagataaggtagtccttgtaaaccttttgaaaccattagggagttttacaagtaatcagttaatgaagagagaaagttacaacattatttggcttaatgagtcatagtaaagacgggtcttaatataaaaaaaaataattttactaatgctctttaaattgttttttgagaacatatgataaattacccttcaatgaaatattaagattggtatatgacctaattgaaaaaaattcaggttttagaaataaatgacatctattagtgtgtcaaaaaaaggaaatgaaagaaaaatcttcagattcaactctttggaatcgttgaaagttgggcaaaaggtacacctctgtaatcgatgagatgccttgttgaaacatcccaaatggttttgaattgcaatttcatgagattctttagagcagttttatacaagcagcaaacataagcacttgccagttttgctggttgtagaaaccaggggaaatataagaaacgtaaagagctcaattgcatttccagataatccatatcatttatccgaaaatgagtctttaatttcaaagcataggaaccactttaaaatttggtgttacatgacctttaaaaaacattttattagattttagaactggtctttaataatgctaatatatatcatttatattcattccaaacattttaaaattaaagaatgagcatataaattgaagcttaaccatcatttttctaattaaacaaataatatatactataatatgtattgataatttgggatctgttatcacttggaatttttgctttatgtgccaaagtaatactgacacgtgtttaaaaggaaattagaaatctgtaaaatgttacctttcccttgtcctctctacagtgggaaactatatggtgttttttatgccaaaaaatatgaaagcaaataaaagtgtagtaataactggaattttattcaattgtgatttgtattaatagctagtatgtgcttacaaaatacaagaacaaatggagaaaaggaaatggcaataaatacctaacattgcatggcttctggattcttgagataaactttcagttaattctgaaggttgtcatcattacaaactataattctacatctgagagtactctaacaagtgttatatagctgctagaaattattgaataggaactaaaaacttttattagtactcattacatttcagtatttactatagtatcattttatttttttaaaaaaggcagtatatgtgttatggattcaaagacagttttgaaaaggactttagtattcattattcaaactcggttattttcttgataaggtcattcaagacccagagaagttgtgatttgtttaagcttacacaggaagatagtagcaaaattaggtgttgaatgaagtatccgatcctgttcaacatccgtttgtctatttattgcgatatactgttcctaattttggagagtacttaaccagcagatgaaagacctaaagacaagtaaaatatgtatatgtgtctgccacttgtatatgttgtatgtgaaattgcttcatctgtggaaccctgcccctgtctgttaaatgattctctggacatcattttaaagtaggcaggggtttggcagagatgtgagtgagctaagtagactaagtaaagtctatgtattagcctccctaacacaggggccacatgtctaagcttccatgaagtattgcatctttctttcttctgctttgcttaatgatatttttattaacataattcctggataaaaatgctttggtgttatctatgtccttaaatgcttcttcaccttcagagcatctagtgatacataggacattttctgaaagttgaacatatttatcatttatttcatatttctgcatcgatgtgtttggccctagatgaaataatttttattttatttttcagagagggtcttactgtgtcacccaggctgaaatgcagtggcacaattttagttcactgcaacctctgcctcctgggctcaggtgatcctcatacttcagcctcctgagtagctgggactacaggcctgcaccaccatgcctggctaatttgtttgtagagatggggtttcgccacgttgcttattgctggtcttgaactcctgagctcaagcgatccacccaacttgacctcccaaagtgctgggattacagggatgagccaccatgcctagccgaaataattttaaaaagcttgttcatagctagagaatgtaaagaaagaaaagaaaggactgatttggtctcaaaagggtcaagcaatagcattctgaagactggactgtgagacttaaggatctgagcagaaaggaaaagtagagattacagttttggaggaaaaaaaaacatgtttccaaaaagtaaaaaacatttaatgtttttatcaataccatttcagtaatggtgttttgatgagccactaaaatcagcatataagtgactaaaatcagcataaaagaaaattagcaaacaggtgagcatgttttttttgttttgtttttgttttcttaacagagaacgtaggagaaatgagaatgaagaggaaaggattgttaagagaagtaaaatgtggcagaaaacaccaagattttggaaataatttagatgtgaacacagaaattgatgttatcaatggattatgtggttgcttttcaaatattgattaggaaaatggtaggtgaaagcaatttgcctccagattcactctttgtcatttcattcaaaaggtctaagatgaggcaggtggccagcacactctagagacactaaatctcttcagaagacaaactaagatttctattcatgacattctttcattttaagagacattttaaaggaaataatgtctcagcccttaggcaacatatacataaattcacatattttacatcaaaataaagtcatgtttgtctttcttgtagtattttgaactacaggaaacttcatttccagagctgttatgcatatttttacatttaagaatagtctcctgttgtgcacttatttcttcagtttccagaaaagtgtgtatcatctattttttttcctttttgctagaactaagtggtttatttttctaaacctttaaatcattttcataaacgtaaacatagactccagatagtatatcagatagtattaaaacacctcctctttcaatatcttgcacagatgtgatcgcaaagcagtacaaagaggttgctgggatatggtgtaattcatacaagcaaaatctgaggaaaaatgtatctccaagtatggaaaacacaggataacacaatgaaaaatcaactgtttacattattaggtcttcaaagtgttatatatttaagaacaataacttttattttgaaaacacaatatgtgctaattattaaaatttaagcagtacagttaagcacagaattaaacacattgctcaaactctatcaggcagaaataacccagtatagacttttggttaacagtattccaggcatttctttgcataaatacaagtgcaagaatggaaatactgatttaaaaaaatagcatttaacatataaacaagactccaccaataattttctaagcatttcacatctgtcatctcatttaatccttagaaaagcccagtgagattggactatttatacgtcccatttaacagctaaacaataacatgaaactgtaagtaaggaaagtgatgctggggatgaatggatagattcataggaagaattaactttaaaaaaaaagaaattatagcatggatactattttaaaataacgttgaactttaacagaagaaaaaaaagtgaagtgaattgaaggtgttaccaaattttttatatatctatctctttgccaaaagcgatattagttcctaaaaggttgttttaaggttcaagaagatgattatgaaagtcattaagtgtttggcatcatcgtgtttttccttaatagcacatttcaaattttgacagtaatgcatatcatacatgaatgatgaagtgaatagctgacttaaatttctgcctggtagcatagtccaccccagtttttgtttcttattttagtcttacttgccaggatttgcaacgtttacattttgttctgaaattatgatttccatagcagtttaatctaaattacatattgaaatgcattcagataaccaaacactttatttactatttcttcttctctatttacgagacctatgtttataaatttcagttttcctcctcaagatgtttttctaaaaatgacccaacgacttggaagttttgtagggtatttcaaacttgagaatatctaggacatctttatgtttggatctttctttgcctcagaacattagtcattgttgcacagtcttcctttattctcctgtagaaaaaaatctgaatccatcccaatttccctccttgaaggggtcttactttttcttcgatgcctgagacttcattttttatccttacattttagttatataattgatatgttttaatgctgattgtcctgttccattgttcctctgggttctatcgttagaacattttcttcttttttctactccccttgggaagtctcttttacacccacaacttaaatcaccatccatctcttgatgactttcctgcctaaatgtcacccctaaactccagacccaaacatttgtctagcagacacataacttttaaaagactttaatataacataaggacaaatccccaatcaggcttatgagagtcttcaataaccttatcctcctctatctgagccagaaacaccactaagaactgttggtttccggtgacactaactcaatctggcttcagcaagaaagggaatacattggtttacataaaagaacacctcacagggagggctgtctctaggccaacttgattcagggctcatttgataaactctccttcagttttcattgggttgcgtcagttctcagactcttcctactggcccctggtagagtcagatttacatgacaactctcagatctacttctctaataactcaaactcaccttcctgaatagaatcttgctgacccttgtaggtttgatatggatcatgtgcccttcttagccagtctctggataatgtgttcatgccagccagtgaatgatgaactcattgacttaacccatgtgacataatgcattcccagacaacaaggactgattgtggagaaagagtaggtccctaaaggaaagccaagccagttactggaagaaaggagaaaggatgttatagatacaaataccattaaaaaaacactcttccacaggtatcagctgtgaccagtgttcccctcccttaccatctacatctcattaaacattcagacttcttgtttgtttcaaaacctcttgaatatgtgtatttctccacatagctactactgtccacctggtgtcagtcagtgcttctcctaatgtctatgatgaaacagcggattttttccctaatctatcacagactcatatttttcaaaaatcttatagtaatatatatattcaaaaggatgcctcctttgtcaaaatgctataacaattggtaaatgctgactctcaatgtctatatttatctggcatgcaacacttggtgtcaactgctataggccaccgtcatctgtctcacacacagacccgtacagtagtgtccacccatcaggtggacctcctcttcttccagttccgatgctgctccaaaagaggagcgagcatttttaaatgaaaatctagtcattttatcttccaacctgaatatctttaagtagcatcacatttttctcataatctattcctctctccttagcgtgacttttggtttgtcttctcaagcttcatctctcttatatgttcttttttttctatgtgctcctttgttttttctcacaatctctttccactcttgctctcctcaggggctctgtctttaccttgaacatacacagactccactatacttccttgctaaatgtcaatgctctgcttagcttgttcctcctggaagacttacctgataccacagtcctctcaactaaatcactgactcaagggtttttgtggtatcctgtgcttaaccaccctgtcctaattcttctaatcctattttgtaaattgcttatttagttgtcagtatgtatgctttcactagatcaaaggatcttgggaggtaaggccagatcttgttcatcattatatctctgcccctaacactatgactaataccttactttcaccagttactgtggagatttggtcaattaatgggtccatctgaggaaatgtaaagagggaactcaagccagaccagactgttcatgcaacacaattctatacccaatacctagactacacctacatatatgccctcttctgggccttcccaggccccaaccccatcaccctactttaccagttccactctaatttaagtcttagcaaacacctgtaatgccttgaagccagaaagtgaagtcctccactgcgttgtcaaggccaccaggagaagtggatagaaaattagtcccatgttcttcaaaatataacaacaaactcacttatccaaacaaataatagtgattaaggggtattatgctattactgcaaaaggaccaacagtttagaactgggaaggctgtgtactataagcaaaaaaacatggactttggagcctcatcgaaatgaattaaaagtggacactacaacttaatggcaagcctagtatttaactcagttttcacacatctaaaatgcaaataataccttctttatagagcttttgggacattaaataaaaaaaatctgtacagtgcctagcacatggttggtgctcattaaatgttagttattctcttttttctttttcaagtataccaagatttaacaaagatttgatatacctttattacacggaaaaaaaagcttccgtgatttcaaacaactatcttacagatgggattttttagaatatagcacatttattaggaggttagtccctgattccttgcatattttaataacatgaccatttcaaaattcaacattatgaaattgtagaaccaaattgaatagatttgcacaatccccctctcttcctgccctgtctcccaagcagattttatctgtgacagaattacccactaatgatgataagcatggcagcaatggctaattgcttcctaggagatttagattcagagaagcatgagtcacctcaccccagattctgcaggttcagataagcgatagtatcttgagcatcaaagtaagcaatgaaagggcttgaccagcttttagttgatccctagctataatcctaaataattaaaactagctttctagttcccccagagtttgcatttatttccaagaaatgccacaccactttcttggttacatgtctgtttttattgctcattagaatggtattgctctaggcttgctcacacaaacatttggcgaggagatgatggaataaaaacaaagcagcaagctttaccaggaaataacctatttttatttgcagatattcaaactaaaaaatattcttcagaaacttctggggaaaaaatgagcaagattaaatatgctcaagcgttgccagaagaaacatgtcaataaaaataattatttttagagtgtagagtgagaaaaaaacctttaaaatttaagcaatgaacttagaattttacagatggttttatatgcttgtgtgtgagtgtggacatagcaagttaaaggagtaaaacagacattataattgatatggtttggatttgtgtccctaccccaatctcatgtccaattgtaatccccagtgttggaggtgaagcctgatgggaggttattagatcatggggggtggtttctcatggtttaacaccatccgccttgatgttgtcctggcgagagtgagttatggcaagatctggttgtttaaaagtgtgtagcacctcccactcctttatcttccccctgctctggccatgtaagatgttcctgcttccctttcgcctttcaccatattggaaagtttcctgaggtctctccagccatgcttcctgtacagcctgcagaactgtgagccaattaaacctctattatttatcagttacccattctcaggtatttctttatagcagtgcgagaacagactaacagtaatcaatgagttatctgcccgtttttgaaaaagtaattaagatgaagaaaaaacgtatagcagaattctgatacaaaatgcagtcctgctagcattgtgtcagcattacttgcacatctttagcttgaacttttgtaataaattaacaaatgaatattatgttatttatttagtaaatttcataagtaatgttcttctgtatgttttccagcatactaaaaattgcaaagaatgcagacatgcataacattatagtaaatggtccaaacaacaggacattaattgactaagtgggtgcagtgtgtttctatgaccaccaatataaaatggaaatatttttagataaagataatggactattataacttaaaatgactttgttgtctgtttcaccatgaaataccttataatgagatgacgtgtttatctatagtgagtatgtttgctttttttaagggtataaattaacaatcttttaaacaagttctaagaggcaagtttgcaatctcagaataactgatcagcaaaagagatgaatattttactatttttcttcagcatatactaggtgcagactccaggtgtagaaaatgtgtgtcccacagtctcatggaagaaacccactacagagattacacaaagctgatagtcgaaagaacagacagaccctttggatctcatgcaaggctttaataaaggcaaagaaaatgttatggtatacaaaagaatacacaaaaacatgaggaatctgagatgcttcaaggcacagctctctagggtcctttgttagtcacacagaagccatctctagattatgaaccaacagcatatgggggaggaattgtggtttcagaagactttgttcttaccctggccaaggattaatgctagatttccacacattccagagatatccatatagctggcttactatctcacacacattggcaccttgacttatactaaggagcatccttgggaaggatgaagaaagatttcctaaagagccagtagaaattatcttagtgtttcaggtgaggtggccattataatcagaggtaacagtatactcagcatcccagagacataccagaacttgacactaaattagaaagtttaccggttcagtgtagctggagtgtatgtaagtaaaatagataaagaattaacacaacactacttcagttgcatttctgggtgacagacttgaacctgagataggggataatgaggtactgggtcagagatacctcttagttctagatgttgaattttagattctatagaacatctgggttagaaatatccaagaaataattaaaaagcccaaaatatagagcatagtctttttgtgatcattcaataaacactaaacaattaaaagatgaattttaagagctctaacaattcctgtcagaatcagttataaataggaaaataaaccaaaaaatgttttaaaatgtttcatgctgtgcacttatgttagaacaaattattgttttcaagtttcactatcctcaaaggaaaagatgttctctcaattaagaaaggcatcaaatgttctatagcactgtaggatgactataaataaaaataatatattatgtagtttcaaatagctagaaggaggatattgaatgttcccaacacaaagaaatgaaaagtgtttgacatgatggatatgcaaattaccctgatctgatcactatattcaaagcatcactatgtactccatgaatatgtacaattattatttgtaaattaaataatatttttctaaagaaataaacttacacaagatcaggtgaaatctggctttacgtggagaaggagtttgcagtgggaatttcattatgacttgtttataccatgtggagtcaaattagacattctcttcctttttttccagtttctcttttatccaaggattttaatcaatgtctgaagttagaatttattgaaattaaattcataaatgtatgtgctgtgtgtgtatacatattatatatatacatatacaaatgcacatatatgtgtgtgtatatatatatatatatatatatatatatatatatgaactctgcatttactgtatcttacagactggggagtaaatggtaacaacttttaaatctagctgtcttcatgttgacaaagcatctttcacataagcaattctcttgaaacctgagaaaagaaaagcctggatttttttttctgaatactaagcaaattcctttcaaatacttaatagcaaagatcatcattattatattgtgcatccacctcatcctgcctcatggtaaaatgtctaaaaagtcatcacaaacatgaaaaactcatctcctgaaaactacagaaattacatatgtcatttagagtagtggcctctatacctttgcaaagtgtcatgtctctgctaaatattactaccttacatatatttatgcttttacattccagggaagtagtcagaacttattacatgttataattggaatacaacctccaagtgcataaattacttgtataaggtcacaccatgtaaaaagtaaaacctggtcttctatgcaggtaatgttcttttcaaatcttaaattatttgaaatgtaatgtttttcttttttactctgtcttctctagtttcagaaatataagagtagaggaatatatagtctacctatttacatatgttaaaacatatacaggtagtatttttattattatgatacaactctttttttggattttacattaaatcaaccttctgcattgaagtatatatgaaagagaaagctgttttcgggaatgattggctcttaatccacagaatgctgctacctgataccctattaccacgtgcttttaaaaaaatatatatttagttcttttctgcactatcctaatacagacaatcattttagcaactaagacatatgtgtccttggccagattaagagctacttcaatactttgtgtcatatgtcacagagcaacattctcattgaatatgcagaattaatcttatttgagtttatttaggatgaatcagtgtgtcttatactggtgtgcttgttaaaaatacagattttctgtccactcatttagatttggtaggtctagaatgagcctgaaaacctgcattttgacacaatgtacgtgagaaacactgggaaatataaggttactttctttctgttggaagatgcaaatagcaaaataagggacacagataaagcctgtattgatcaataatgtctaccttgttccctaccaatctttataggaagctaatgataagccacaaattgagtggctttagtttcaattttctctgctcctgcacaccagctgtggcagtgttaataagcatcaaaattgctcaaaggtgatgatttaggagagtaaaaagaaaattgtaggatgttaataatcttttgtactggtgacacctagataaataaatcttttgggaacaagggtcttataatacagttgactatgctaaaataagtaccagttttccaatgaaatagaaatgcctctcttaagctgttcttgaacatgtttgcgtagtacagacatcaccatcaagattttttgaatgtccatctatgattaacaaaacttggagtcaaaattatatagtttgtcctaatagtcctctgcctttcttcactggctcttgatactccctcaatggggcccctggtcttttccaaattctcttcccttaattcgtatcttctaaccagccatgttctatcaaattgggtaaaggttagagattgatcattagtctgtgctgacttatcaactctattagtactttagcagcaagtacaatcctgctagcactgttaactgcttaaaatttgtcaggcatgtattctgtctttatgttcatgacagttctatgagatagatactgtagttataatgaccctatatgtacttacctatgttggttactattatggctcccattttatggatagtaacattgaagtttataaaaattacaaacttatatgttttggctctgtatcctcacccaaatctcttgtgaaattatagtccccacgtatcaagggagggacccggtgggaggtgattggatcatgggggcagtttcccccatgctgttctcatgatagtgagttctcatgagatctgatggcttaaaagtgtgacactttcctctctctctcgttctttctcctgcctccatgtaagacttgcctggccccaccttttgccttctgccatgattgtaagtatcctgaggccttcccatcacgtggaactgtgagtgggttaaacctcttttctttataaattactcagtctcagatagttctttatagcagtggaaaaaatggactaatacacatactttgccagaagttacagtttgttattagcgtagtgttcaagtacagatggcatgattttagagtatgagcttctaatcactatagcatgccaccaggtatgagacctctaagacctttgtttcaatgtaagtagaaatgcctcttgttaaagatgtttccgcgtcttagagtaggttgaaaaattgtcaagaagagtaaagggattgatgactcttggtcctgctgagatataagccatatagaactacacagcgtcttagaaaaaggatgcccctgtgtctcaccccttggtatgctcctgctgttctgatgagtagtttctagcaatttattcctgaaagttgccaaaacagaaaagaataagtgtcctgttgtcactgccttcttccaaaacatatcagccaggcaggctgtctcccctcctctcccagtctgattttcccaaacttgaacactttttgtgtttttacctctgtcgcaccaggattttcagagccatatttttaatttttttaatgccttaactgataaactattttttcaaaaatatatttgttaatgatttgtactgacttcatagacatcacatagtcatgctttattagaattatagtagataggtatatccctagcggtgtaagaggcaattgaggaggaaggataatagtaggatggaatagatgtttataaaactggtaagaagagggacagaaagggagagagctgcatctgatatccatggaaggtggttttcccataggcagtaagttgtcctgatttactctatggctggtgaagcaattcttaaggaaatattatctacattttagaacacttattgtctaacttatcaggattcattcttgagcctggatttagttttaataaagatactatttcatgtttattattagtgctataagaatattatagagtaaattattcattttccctctaaagtaatgtctataatttatgtagtaatacccacttctggatattaactatattactaaaaggttaaaattgtcttcttttagtctataaacctatggattgatatttcctgagacctcctatttctgtttttcttaaatgagatatatttgaaaacaggtcccacaatgtgtgacacagagtaggtgactaatatatgttagaaatcatctccttctttatattttctacactataaaattgtgcagtaatttaatttaatctctgggtgtttcaattacttaagaagttttcctagaaagtctcttagtcagttagtgctgctataacaaaaacctgagattgggtaagttataaagaacaaaaatttatttctcacaactctggaggctaggaggttgaagatcaagggattggcaggcttaatgtctgataaggatcctgtctttgcttccaagatggcatcttgaactctgtgtgctccaggagggaagagtgctgtgtcctcacatggcagaaaggacagatgggcaataaaaggtctagctagttcctcaagacttcgtatggagtcataaatccatgacctaatcatttcctaaaggtctcacgttttaatactgttgctctggagattacacttcaaaaatctttgagggagtacagtatttaaaccaagcctgttaacctgcagcctatgggccacatgtggcccaacacaaattcttgaactttcttaaaacattatgaggtttttcggcatttttttttagctcatccactatcatttgtgttagtgtattagtccattttcacactgctataaagaactgcttgagactgggtaatttataaagaaagaggtttaattgactcacagttctgtatggatggggagacctcaggaaacttataatcacagcagaaagcgaaggggaagcaagcaccttcttcagaaggtggcaggagagagagagagcaagggggaaactgccaaaccatcagatctcacaagaactcactcactatcatgaaaacaacatggaggaaactgccccccgtgatccatcacctcccaccagatccctccctcgacacatgaagattacaattcgagataagatttgtgtcaggacacagaaccaaaccatattagttagcgtattttatgtgttgcccaagtcaattcttccaatgtggcccagggaggccaaaagattggacacccctgatttaaaccatagcagtctccttttcttgtaaccataactagacatggacatgacttccatggactttgcatgtaataacacacaccaaatcttataaacgatggagagtactattaccttgttaataccatatgaatccctgaactagtaacgctaccatcttttttatcttgataatactgtgtactgaaaaactttagtaacacatatacattaaaattaattcttagaatacctacctgtatcctaactctttggatttaattttaggttaagatatacttagtaaaataaagccttgacaatcctttttaaaatgctgatcttcatctgcccaatactttttttccctgataattaccattccttaattcagtactacagagtatctcaaaagtaatgctaaaaatgatgctttggagagctaaggagcagaaataattcagctgtcactcttctgtacagtagaaggaaatgtcatgacttctaacttccaacattaataacatagagctaggaaagctctaaaaagaatgtattgtctgaaaaataaaactgacacgatgtcatgattcacatattttcaatttggaaaacatgactgtagaaattcattgggacttttaaaagcttggaagtttactggaagtaggaactatactaaggagaaccatttttaaagcagggcttgagttgcctatgtggtgtatatacccctacaatgcatttcaagcctaataattatttcatggttttataaattaaatgttgttataacaattataaagaaagttattttgacaggcaactatgtagatcagaatataaaggcaaaggtagttatttctttatcccattttgacagagagtaataggtatttctccaaagtacttaacaatagcagagaaaatgatggttaacaataattgtgaaactgtttttcatattcatagctattgtaaaaataaaacaaatatccagtgggctatttgaaatttagtgaactatcaaacacttttgttggtgaaatcacatattaatccaattgcaaatcaaagttccatcatatacatgaagctgctttatttttatttcagctaatcaacagtgaatcataagttaactggtttttttgtttgtttgttattttactttatgctgctgttgaataaagtcatagcctactttctgaatgatctctagcaaatttacaagattatatggcttttgactgcaaacctgtttctactcttccattttgctttgttgttttttttttgcttcattttgctaatttgttttatctttctgtattttatgagtagttataagctaccttaaataaatttttggaagtagtggaaaattttttaatcagtgaaattattttttaaaatatttttatttgaggaaggaacccctgggaattcaagatcaatcatcagcaaaataccctttgtcttaaacctctcttctgaaccttattgctgcttcttactctgaataaaaaccaattctttcataaggacactaaatccccagtagcctctgaagtggtatgtgttttccttccacaactatcctgtagcacctgctataacaggtgaattaaatgttctccttttctcttccctaaaattttccagctttgaatttcacattatcaaactatgccacctttcctctctgtattgaaatcatctacaatcccgagtcattccttcactgttttaattttgtaacgcttggttcatagtttgcccccaaataactccatactatgaagcatattataatatacagaatagaatgtacatattataatatacaacagcatattctaatgtatagtattctatataaatatagaatcacacactcttctgaggtactgatttccttgtacaaaaatattctcaaccaaatagacacagcattccaagtccttggtccattcagtgaagatgtgccattctgggctagtaatagaattatcagtgcacagtcctattcatatggaagatcacaaccaagaagttaaatgatttgctgtaaactctttctgtctgttgaactggagataagtaaattaaaggcattgaaataatttatgatatatttattgaatgctgtgccttgaccttcataaactgcatcatttaacaagacaagtttcagactttaaccaatttatagtcactgaacaaacatgcctcagacttacctcttttttacctcatagttgaccaactgcatgaccttattaatgagatcaccacacatctacatagtacagttacactacttaacagatatataattatagtactgtatcaaaatttactttattaaatttaggaaagaagtttctagaagaatatatacaatataattagcacctaataaagttttagtgtgatatttcctgcaaattttaatctataacatttgataagtagtgccctatttatacactccttttgtcttttaattttaactacagtgtcataagcatacttgctaatgtaagtattcattttatgatccctattaaatttaagattttcactaattaaattcctggagttataatgggacattaaaattattgggagaactagcaatgataaatatattttcctactcgtttgcatttatataatttcaaatcagtacataaaagccagaaactaattgattatagttgttttctataatctacctggattatgtagtatggagcaatttaattttagagatactctttggcttttatctataaaatacttttagttctcccacttgaataaatgagacaagtctattaaatactaacttattaaatccttagcactgtgctaaactccattgtctcattaactcaagaaatcctcagaaatatcactactgttattttaaagagcaacaagcttgggatacaaagtagatataacaaaacaattagaaacagcagagccaagattcaaatcttaatctccataattccacagattccccttaaattctacatcactatgtagagtaaagtttgaccttgttattcagtaagtagtcagtccttgaggacaataacaatttacaaaagtaagcgccttaatgtcagtgtttacatgggaatttgtgttttactcatggcttatatgataaattggcaaatttgctatcctgataacaaattgaacattcagtcaatgtggggaagaaccaaccacaacctgaacttctcccagaaagtgtgtttacagcagcaagccaaaagcactttctgtggagtggctaagactgttgagagaagagaaagttactttttctctccctgcatttgccctaggcttttgccagaccatccacccactttgcattctttcctgaaggctcctggcaggatttctataggcgtagattgacagatggggttctagtaactgaggcccctccagctccaatgggatgtcatcaaggactttaaaaaggcctttccccaaactacctgctttataaaatgctatctatcttcaaataaagagttaatcatgattaagtggcagtaactctgagagtctctaggaaaatcccattctagaatttattgggctttatggagtgatgcttcctgggtttgtgcagatgtttccacctgaatattcactaaacgagtgtgtttctggagcaaagagaataccatttgttttctttttttttttttttttttgcttgtggcaagcagtatccataatttctatggacaaacataattttgaaatttgtactaggttagccctgaaatgagatggaataagtatcatgactctaacgctattataatgctatgttcttgcccatacttcacttatttgtgtattttaatagcatgcatcactttgaatgaaaacaatcaaattaatctcagaattgagtcagtatttgtattttatattttgcattattatcaaggaactgaagtggcatgtcacaaaatgcttcaactgaaattacgttaagtggtttactctaatcttcagacatattaataaatgaaactacatagttcattaattaccattcctatgtaacaattagatgcacagttcatatttcaattaataaatggaagtgcacagagtcaaggctcatttcaaataccagttctgtagtctgaaaataccaagcttaaatatttgatatattaatcaaatatatcatgaaaaataggtatagttctttttgagaaagtgatatgctgcaatatagttctgtatatataaagggaagttttttatataatttgggattatagttactaatcaggctattaaatttttataacagttccaataaaatcataaaggtctatgataataccaggattagaaatttaaaagggcagctgaaaaatactcgtagaagttgcccaggaatgtgctaccactgatttttttaaaaggccaaggaaaatcaaatagaatcagcatacagtagggttcgaacaaaacccattaaacattacagtgaagcattacataactttactaaatagcactatttagtgataattgacttcaagtgttgagaaaactaagtcaaattatctttaaaaaacagggatttaaaaagtaaacaaaattaccaaactgaatttagaagtctataataagattggcctaattgtaacaaaagcatgatttgcaatagtggaagcagaatacttcctcacttttacaaaaggggaagagagaattaggctgtttattagctgctaagataaaacaggtgatcacctcatagctgtatctgattgcagactgattaaagtgagatggacccagttgattatacaaagagtactacactcctttcccgtactccacaattgtcaggaccccaccatatttggatgcttgatgttcctgtcttcccgtctgtcatttagtgagccaaagtcaccagcttcccagcagattcctttcagcctactaacagaattatattgactctataaaataataagaaaaaaaatggcccttgtggaaaagaataaaagccacaaacccattattctagcattactttgggatctggaaccaaataatacacacctggacacatcattcgacaccatttgcttttggaagcaaatatttattgagtgcctgctatgtgtcaataggcactttacccacacaattttttttcccacagcccacttgtaagtacaggggacatctatctacattttataaactaataagctgcagttcagtggcattaaaattcatagacctagcaagcagcagagccagaattcaaagcttaagtccacgtgactgtcactctgaaacttatttgcatagttccaccaagccacgtccacagggatctttaacttttctgttcatcactttcttttcaagtatctggaacagtgcctggtacacagtaggtcttcagtaaacagctgtggaataaaagaagctctactctggtgcagagcctgctctccctagtggctctgtaggaggccaccgacattaagcttgtctcaatatgttccagctcagagtgttttttgttattgttgtatgtttattttctttacggttccttgtgttgaatctttaaacctggaaggtaaaacaggatccagccttctttgctttgaccttcatagcacactaatgacagttctgcatacagcaatgctttgcagaaatagaccgtattaatcattgacagaaagtttgttaaaagaaatcaataaatctgcatttcaggagtatcattagcccacactcatttttcactcaaaagaactatgcaccacctatcaagacctgaagagtagatttttctccttttctacaaaaaatgaggacaggagtttgagtaacagactcccttaatatgatcactcattttctatgatattcaaatatgaaaaataagttctgcttgtagcatgggaggaggttttcttaaaaatggcttaagagttcaaagcaaacaataatcacttacagctagaaaactacgctgtggcaataattgtatatttgaaaactttttgttgcagttgatttggtttgttctcaaataatgaggctttgggtagaatggagtgaaagaacctgtaagaaaaataaggcactctggtcattgaagatgtgtgtgtagcctgtggcagcaggtcagaggtttgggtctattttgttcactgatgtatcctcatatctgaaacaggacctgatacatagagtatgcacaataaatatttttgagatggattaggacatagaaatcataacgataatccagtgtctcagagaaatcctgtgaatggtaagccctgaaagatgaggggtgctagagcatttaaagaatcttctctccaaaagggaaaataagagataaatttatctcaagagagctcagagggcacttgaaatatcaggggtttctgcaaataaatatatttagtgttcaggcacataagtacatttgggaagattattttgtgtaagtttaaacatgaagtagaacaatgatcagtatgttgtatagtcaaaagcttaagtaagttccatgaaaattaagaatgaaatatagatgcttattattaccgttgcacaacattgctttttaactaattttgtgatcaaggaaaattaaataattagtaaccatattggcgaggaaaaagatatatttccttttattgataattagattccagcgcacttaaatttaaaaaataatactactagatttaagagaatttggtaagctgaccacatactgggtaaacattccttatatagcaatatattgttataagtagaattgaaaaataatctaacttaccaaaacttataaagcaactaagaatatatttagcatgaaatatactcagcctcactaagaaacagaataaacacttacttaaaagaccctcacaaagagatatattatatgtgtagatatcctaaaaatcccacttgtctcatgttatataaaaatctgattaaattgcaatgagaattgcaaataaattaaattacagtgggagttcagaagaataaatgtttgaaagtaaccaataccagtttgaggaaaaaaaaaaacaacaacaaaaacttgcgtatgtgttggtaaggattgtagctgcttcaagaaccaaaacccaaatcctagtggcttaaaatagggtttttattcttgcttactttgcagttcattgtgggtgggttggttctttttatttgcttgatgtggctgttattatttcatttttatttctaagcataaattcattgaatgttcattctgtgctagtcgctggttgtattttctcatttaattctcacaagaacactgagattttccctattttatgaatgaggaaagcgaggctatgaaaggcagagtgaaacagtggaatcagtattcggaaactcattttatctgactgtaatgtacatggaatattcttttgactgcctttgtttttaaaccgctctcacaatagaaacattatataacataaatctgaactagctaaatggatgtggcatagataagtaatactatcctcagttttcacatctgtaaaataatgcaagttacatgagaatatttccacagcccatgtgttttataatcatgtgattctctagtgagaaatgaattgtgaagcttgcctggctccaaaccccatgcttttggttttctattcaagttgatgcttatttatttttataacacttctgttgatagcaatacagataaatgccctatttactccacctgtctcactcttcagatgtgaaggatgtttgagtgtgggagggactccacaggcaggacaaaaactcgctgcttcttagtgtgaccatgtggtacaaactcggtgggagagcctcctgagcaatgaacacagtttcttgtttatagcaagtagacttgtttggacttaaacatggaaattgtattttaaaacaagagactataaaaataatataccctatatccatgtaaaacatgaacaaatacaatgtaataaataattgttataataaaatgaggaacaaatattaaatataaaatgtggactttttaatactcagtccatattttaaaaattttctatcaaaacttccttgtcctttaaagggataacctttttagagtatttaatttaaaatttaaagtataaccttttgttggtgtatctattttagtttttttcaggattatagttttgattaataagtttaaatccagttgattctgaccctgctttagcaaatgactattatgatgtgctttttaaaaatggctttttctgtattgcttggcaatgggaccataggaagtcagccaaataaaggctataaaattaaattagcttactcctatatagcttatctactaggtacagttgagtagctaacaggcttaaatacttttccttttttttgcacatatggagtcaaattgcctcaaagaaaattagtcccatcatatttgaggctctgcaacattggttacaaagatatatacgcatttttaaaaaataatgagaatattcattgttatgccaccaatatttattaatcttgaagcaatataaaacttttatattataaaaagtaggaattattctcccttaatattttacagtaattctgtagagaacatattatctacataaaattggcatattttgaatttactatacataaaatgtgtattccagacatttttgttataaatgatgtcctttgtatgttaaatactgtcaaatttcatagcagttagacttcgtaactctttagctatttaattgttatttttctgatatttaaaaacagtcctacattattcatagtgattctgaaacatttgaggaaggaaagcagatattctaaatgagtccatatgatgtccaacactgctctctactggcaaagaagcaagttataaaacaactattcagcctttcaagtgaaaaaatcttccattttgaataatatttgataacgagggtagaatcctcaaacttccacacattttgttaaatagaatacagtgaaagaatggaagaaatgaatatagacatcacttgtggaaattagcttaaaagagaagtctttgttttcattttaactatttgaaaaataattataggaattttggaaaatattaaccaaatacgacatatcttactagcattttaagagtcaccaaggtaaatattttgtttacaatagcaagtttgataacatttctatagatttaatttcagcagactgcagcctgtaaaatgctgtcttttgtacatctgcctaaacaataagtattcaaatacattgagtggagagatacatggggtggagtatttatgttgaatataaaattatatctatagtatcagaaacttgttctgtatttatcagagtctttatagaagatttaaaaaagacatttactagtttgtaaaatctgacgaactatatgccatgctgttataactttcattatatagactaataatacacaaaacatttttagatcaatgactacatcttaccttttataatctaatattctaaatttcccatctgtgttttatatcattcttatctgtccattttgcttgggagtcatattcaatgttttaatctcaaagttcaatatatgtagatacaatcacttatacctgcatatttacacaataatgccaaattatatagtaattgatgaggttttgttaggtttgcttaatattgtcattggccgatcacttttattttaatgtaaattgaaaagataatgtgcaatatttttaagaaagccacttcttggctgtgaggtaaaagttgatgcttattttcattgatacattttctggagtgttctcatttttcttagtgaacatatattaatattaaaattaacgtatttattcataaataaacagaaaaaccttgttgcattttccaggcacaagcacacaattgtgcaagacacacacttgtactcatgtaaactctatggcctgatatttcttaaaaaaaaattcaccgtaataaattttgtctatttggatttacagcagggccttgaataacactctttgattcaatgttgttttattccatgttattggttataaggttgatgagaaaaaaaatatcagttcccagacagggctactgtctgtgtggggttttcaggttctccccatatctgcgtgggttttctctgagtactcctgtttcctcccatattccaaaatgcgcaggtttggtaactgatctgtctaaatggtccccttctgagtgtgtgtgtgtgtgtgtgtgtgtgtgtgtgtgtgtgtgtgtgcgccctgccactgggtggcgtcctgtctagggctgtttccagctttgccccgagctatcgggcaaggctcctgccacctgggaccctgagctaaaacaattgagtaaacaattatcttacttgtttctattgatctttcttaaatgtatgtatagctcacatttattttggtgtttaacattggaagtatttcggtctttatttagaagtttgctgatatttttgtgaccagaaatatggtgtaggaacttaactgttgtttatatcggttagcctatggtaaaattggttgtgttatatgtccttcagcttaaagttgcagtttcaaagaacctattgatgctgttaagtgaggacttattgtacagaaaaaataaataaataaataaaaccctgaacactttaagtaagaaaaaaatgcaggaacaaatatcacttgccagacaacacataacttttttcttttgctctttgccaaagtgaaaaataacactgaatctaattgtatgaagcaaaatagtctgaaacattatactccttttttcatcattgctaattttttttgttttctcacatggaggaattaagacataaagttgcaaaacataaaaatgagtatttttacacaattttaaataatgttgaatataccagtgtcccatttttaagagactgtcaatgaaatattcctgtatgcctctttcaggtaaatagcaataaaaaataaaccttttgggattagcttttaatatttgtcaaaattccctttcgatccatctaacttgtcttgtttatcaataattcattcatttttataccttagtagtattccatggtatagatgtaccattgtttaagaatccactcattgcaggacaattagattgtttctgattttgagctattacaaagagagctacaatgaacatccgtgcaggacatttacttgaacattagtattcatttctctgaggtaaatactcaagagtgcagttgctgcatcttatggtaagtccacatttagtttgaaatgaaactgccaaaccattttttttttcagattggctgtaccattttacattcctaccagcagtgacatcttgtaattttatttgctatatctggcaaccgcattcaggagtattaatgtctcacttgcatgattccccctgccatttccttgaacactcatcttattcccctttgcagcattattctcttccatctccctctgaaatatggcagctacctgaggacccaggatgctggcgctcttttcaatctctcagcctttcattgagacctttgtgccaggatctcccgaatccacatgttctcttcagaattcttcttcctcagactccagcactgtatacccaattgttgagtctggtatctctagtgagcacgtcagagtcatgttaaccttaatatgcttgagtgtatgtttcatttcttccttacatcttattaatatgccacctttttagagagaactgatgactctttcttaaatattacccacactctgcccagtccatctgtgtgatcaaaatataatatgtgtgtctgtgatctagacataaaatagacatagatacacatacacacttacacacacagacacacacacacacacacacacacacactcatgaggataaaatccatgaatacagggacatttttacctgatcgctacccagcacttagtaaatgctagactgatagtaaatactcaaaaatattttaaggaataaatgagcatatgttaaattaacaggttatcttctgggggcttaatttcatttttattttatcaaataatctatgtccatttaaaatagtcaaatatttctccaaaatttataatgaaaaaattaaaaaacaaaaccttctctagcccttctcctaagcctcactcactgaagcaactgcattttgctttcctgtcttttgttattttattctattctggataaagtgttgtactgctgtgcttttattcgtcatatctgtagtggccatcaacaccctcctgacatatctgccctgtttcctgggctcattactccctctgttttattttagttccttcttttcttactgagaactgggacatggcaggcaattttttgagcctctgcacatctcagtatgaatttttctttcctcatagcctggaaacttggttcaaaattatcatttccctcagaatttgaagttactttcttccattattgctgatgtgaagaagtctgatgtcattcatatttctgggttttgtttttgttttattttttgttgtttgtttctctctggaatcttttgtgattttttttcaatctctagtgctttgatggtaagcctctttgtgcttgtatatttgttttcactcattaatataacattgagtcccttaatctgaaaatttatacctttggttctgggaaagtgattgatagtgttctatcctttagtttttcctcttctctatttctaggactctatttggtttaatgttggctctcctaaaacaggttctcacctttaggcatgcatcagaatcacctgtagaagatattaaatctgattgctgggcctcactcccagtttctgattgagtagaatttgtatttatgacaatttcctagttatggtagttgatgctacaagtccttggaccaaatttcgaaaaacactattctagaccaattcttcaattgttctagttcgtatcttattttaaatatctggcttttgcactctctgtttcctttccttggcctgcatttccccaaatatctacctttctgattgttttacatttcaccttatctgtgacatctcctctgaacatcctatttaaaatggtatgacacagaaagcagacacagtcacatactctgacttccaccagttctaagtagcatataattcacttattcttattaatattgtttggctcacccactaggatgtaagttccataagggcagggaaatttgttttttcagtgcatttaataaaacattatttttttttaattaacagataatattgtatgtttttattctgtatgttttgaagtatatatgcattgtggaatggttaaatctagctaattaacaaatgtattacctctctgctgtattcttaactcctaaaatacaacctgaaaaattgtaagcatttaataattacttcttataattttttctaactttattttttaatattatcattttttaattacctgagtcatatttttaaatttctgtcaattctcttttgttctttatgtgctactttttctagcatcctggttttattatgaatgcaatatatctatattgactgtagagtattagccatcattttttttattgcgctccctctacttttctaaccattccttttgttgctgttttttttcccccagtcttttcatgtgagaggcttttctcgaatatattcacatacttgctgtgttttgatatttaagatcgactcactcaaaagccaactggcggttctgtggacttgagcagggcttgtcatctgctgactgatcaggtgacccatctatttcacatggaaacgttaactgtcagcataggttgtcttgttttcctcggtctgttttcctcagggaaaaattcttctgcttggaggcttataagattagcagctagtatcctgggagccaggctgagaaaagagtctaggggaactttcaatcctgcatgtggacttctgcttagtatctttgtcagttaggtgcctcacttctgctcccagccatgcttactagcattttgcagcccagaggtccccggcctaattcttcagatagttaacaactcttctgttgggatagggtgaattaattccctggtcacggcatgattccttttttttgtttcaccctccaggaaccaggcagagtggaaaagataaaaatcaaagtttgtatactttgtacaagccttttgatggcacttaggacagttatttatgggtttatatactagactgtatgtccctggaatgtaagcatttaagcctttaaccagtgtcttaggccagtttctcccagaaataaatcccaaggcaaaagatttaagtgcatatgatttattaagggggtgctcccagaagaaatcagtaaatgagtagaaaaagcagagccgacaagaagaaaaaatgaaggaagagtagacatcagctggagccacagcattagcctaattccatggtaagctctgcatcataacattataccttagcgtttacctcacctccaaacaaataagctgggcttttgtacctccacaaaacttgtggagttacaaaacttgacttggctgactttccttagccaagtcagtcgttggctaaggaatgtgatgatggggtggtgtgggtatgggagggatgaaaagaaactcccatatgcttctagctctcaatactggcaaggtgactttgacttcattgcccaaaaggaatactctggaggtcttgagtgtgagtcattaccagcaaagcatgtggaaactggaagatgggtctctgagttgataaagtggatcccaggagaactgagcaggcaccagttgtgtccactaaaccctagtatcttcccctaacaatcatttgataagggaatggcaatccctcataaacaacttgtagtttaaagaggttttctttttttcatctcttactgcaatttctctttagaatgatttttcaggagagaagaacagcatttattatctctatctttcaaaagagtcagacaaggcagaaattaggggactttcctaacattctcagattctaaatctcgagcttgttctaacatgctacctcatatctaagagttttataagtattttagataggtgtaagaaatgcacataaatatgaattatttaatctatatatcatgattttttgtaattaaaaaaatacaggaagtataaggcataaactttttttagttttagcatgattgtcctataggttttctaacattacataagaaaaagttgggttaagtagagtgctccatattaagatatattttaatttaatacccaccatcactcaaggcttctcccagtgttgcattacacaaaggatttaattaaagctaatgtgaaataaacatgttaaaaggtttcctggagcacagctagaggttgattcatttcaaatatacttggagttcttccatatttttcccctatggccttatttgcatataatacttttgactcatgacattcctgctgaagtttgaatattcctccagaaatactgccagtaaaacttatagtctattactgatagaccagacccttccttcttctagttcaataattacttccccataaaggatccatctttgcttctctgctcctgctaatcctagaccatccactaatcgcagtgatatgataaattcagagaagttgagaactgtttaccccagggatgtattcagaactaaatagtttctattatgttaaatcctcttcagttacttgaactcttcttcctttctggatgatctgaaacagtgcttttcaaacctggtggcacattaatatcgcttagggagctttaaaatatatagatggcctgactctgacccaggctagtcaaatcagacttgcaggcaatagtaataagattatagcttccaatatgattctttctctttttttttaaattgagacagggcctcactgtgttgctcaggctgccctcaaactcctgagctcaggcagatctcttgcctcaaactcctgagtagctgaaactacaggttgcatattaaagcaccatatcgtaaccactgcacctggctaaaacgcccctatgattctgtcattcaatcaagtttgaaaacactcatcccaaactggagaaatgtgacagctccattggtgtcaggaatagatttggctgtcttccaatcttgatagcaggatttcatttctttttctgcttaaaatttctcattcactttggtcttttatgtatgcctggtcaaccaacaactggaggtcacagtgaggcaaactgaaagcctgttcatatcttatctagggcctcttaacaatttggtatatttcaagcatattaaaaaaggaactattggccgggcgtggtggcccacacctgtaatcccagcactttgcggggctgaggtgggtggatcacgaggtcaggagatcaagaccaccgtggccaacatggtgaaactctgtctttactaaaaatacaaaaattacatgggcgtggtggcgcgttcctgtaatcccagctgaggctgaggcagaagaatcgcttgaaccaaggggttgaaagttgcagtgagccgaggttgcaccactgcactccagcctggaaacacagcgagactccatctaaaaaaaaaaaaaaaaaaaaagtaactgttgtcccttacagaatctgaaaagtgaaacttctctttgcctcagtgcaactgagctttactctctagcctccatttgttcatcagaaagggaacaccagttgttgcctgtattttcaactcatctttgtacctaccttccactatcctcatggcctgttaactgtttctaactctgttctttagactttggtacaaggagtcacttgcaatgcttccagaaatataattcgcttgccctacctctaaagattctgatttatttgaccaaggaacatgtatttttacattttaaccaacgctctaggtaattttcatgccagttgtgcagcgaacccattttgaaaatcaaaactctaatttccttagtgattatttttttcaagaatgaaggaaggaataagagatagcatgactttactgtattttcccttctattctgtaagttaatacatgaaaaagattccacttatggaatttttgatgtagtttacaaacacgtattctcctatgtctatacataggagaagtgattaattcgtgaatctctttggtcttataattggtggtatgtcacaagagcaaaaaaaaatctttggaaaattacatatatttcatgaatttaatgtttgtttgccctatatatagaattttttctagaataaaacctgtatatttcaattctaattggtattgaacatttagtgatactagacttctgtttaggaggtattatatctttccaaggtagagattttattgcagtgtgataattattatgaaacttttttcactttttggattggtcaggttttacttaaacacacttactgtattagtctgttctcatactgctaataaagacatacccaagactgggtaatttataaaggaaagaggtttaattgactcacagttccacggggctggggagacctcagcaaacttaaaatcatggcagaagatgaaggaagagcaaagtcatgtcttacatggcagcaggcaagagagcttgtgtaagggaataccccttcataaaaccatcagatctcatgagacttactatcatgagaccggcatgggaaagacccactcttgtgactcaattacctcccaccagtttcctcccataacacatgggaattacaggagctacaattcaagatgagatttgggtgaggacacagtcaaaccatatcacttactgactaccttcaggtttatttaaaacagtaaaattggccgggtgtggtggctcatgcctgtaatcccagtactttgggaggtggaagcaggcggatcacgaggtcaggagatcgagaccatcctggctaacacggtgaaaccccatctctactaaaaatacaaaaaatgagccaggcacagtggcgggtgcctgtagtcccagctactcgggaggctgaggcaggagaatggcgtgaacccgggaggcagagcttgcagtgagccgagatagcgccactgcactctggcctgggcgaaagagtgagactccgtctcaaaaacaaaaccaaactaaaacaaaaccaaaaaacagtacaattgtagatcatgtatgttttatttctttaactatagctttacttagttgtatatcttggctattaaaagaagcttgtattttaaattctacatgttagatgagtctcataagtggaaaacaaagaaaaatgtttacttgaaaaaaaaagctaatggcgaaatctttggcatcagcaggcagaggcaagtggggagagacgtgagaaaaaaaagaaattgtaaactttgaaatttactattgatgttaaatatagtaacaaaatacaattacatgctttgaatgaaaaataatttttaattactaataagtttactaaattttaactgttgagatcaacattattcccttgggcctaataaaataactttagttttctttccagtaaaaatctacaagtaaaatatttagaaaacaagtatgtttttaaaaataatctttgattaacaggaagtataaatgataaagtttagttacattttcatataatataaaaataatataaaataataattctatttaattaacatatgagtttgcattactattaaaccattctattatgcaatcttatatttcaacatgatgcaatgatatatgatatggtaaaagcctgtgtctcacaaatgaccattttcagtttcttggcagtacagaagtggaacagccaaaaggaacagaagttgtgagagatgctgtaaggaaactaaaggtagggaaaggccttcaaataaattacaagtgtattgactctgtcatgttttcagcagattgatggagatcaaagcatgaacagctttgctgcaggtatagcttcaccctattaaaaatgaactattgaacaaatgtaatcatatcaaggaaacatttttaataacaaacatgtacacaaaattgtgtttaaaatatggcatactgttcacatttttctaaggtataatgtgtcatattaaaaataatattttatggcagtgtgtcttgaatatttgttttgtagcttgcctttactttgcttggataatgtgaacctatgtcccaaatcaaaagctagtaatggcataacaactgtctttaaaagctaagatataatatccaccagttaaaaatgtggagtcagagttgattccagccagaattttgcagtgacactgtatgttaaagatttcctaatctacaggtccaacaggatctggcaatgtccgtaagtagccatggggaaactggtgagactaagagaggagagaaggacatttaataagcaaccccacatatcctagtcaacaagtttcctgagaaaatcttacataagatgctacacaccatgtttttctaattgttccgcatctcgaaggacattgttgtcactgagcttttgaaatttacaaaactccttcaacagaattctcagctttatcatataagaaaatacacattatcactactttttttttttacacagttaaatgttattctctatagttgctctcgtatttttggagaaacaacccttctctaactttatttggtttagggaccatccggttattctaaaggagggttagacctctgagtgtgccaggcaaagtcagagacattaaatggtattactttgctttgagaatatcatatctggtggaatccactctgtgtttaaattgagaaataattgaattggcatgacttctattctgggtaaagaaataaaggtcaataatattttatccatcttattttatatgagaatattttactaatcgttttaagtaaatatgctaaaatctccgaagataatatcactcccatttgggaaaaaagtggattagccaactatttatttccaccattcattaggtaataattcagatttgccttttattggccactagttttaatcattccaaaagaggatttaaaagggctcacagtttatggacacattagaataggattctatttaaatgcttttaaaatgttgaggattctgggcatgaatccaacttcactacaatcagaatgttttatgaaagaacaatgttatttacacatagtatttctttatgcctaggaggttgtttattcagtcaacccaaatcaaaaaccaaaaaaaattcaattgaataatgaatagatcaaatgtaaagatatatttgaaatcaaatgctttctaaacaatgacgagtttacatatattttgcaggattttgtatgtatttctatggagtttcatgtttagaaatgtactctgttaataaaagaatgtgacctacaataaggtaaaaaattaggtagtatagtttaaaaatgcacacttattttatagtagctgttttttctcaaatgtcttccaaaagggagtgtatttaataagcaattttactgtgctgattgcaaacattttgtatatcaggaaagtatatctaagggtaatgattcatacactaatgataatgaataaaacaatgctttttatctatttttatatatatatattttttttttgctttttttgtgtgtcaagggtcagaagctacaattcaaagtatactaagaatattttttaaatgtcaagcctggcgctactggctcgcaatggccagtaggtggtggtgtggctctactaaaaaaaaagagaaaaaagaaccttgctctttgatcatacttacacatctccattttaatttcctgcttatttttctttaacatatgaattctgactacttttaaaaaaatctatataattcagtatgtgaatttatttgccatgtaaggtaacattttatttatatttactcctttttcagcaatattaatgtaatggcttctgatattaaaaaagaatttaaaatttaagaataaaagctgatggaaaaattaaagaattctcaacaatgaatttttcatgcttctgtgtttaatgatgcctgcttagttttcaaaaaaatttaaaactgacttttttacactctttctatcattttttagagaatttacagtttataaatttttcctttataaatataattatttttataagtattaaccttttaaggttcagatactatatttatcaaaacatgttctttatttcctaatcatgttcagcagtttctatttcttaatcatgttttagctgggcttggtggcacacacctgtaatcccagctacttgggaggctgaggcaggagaatcacttgaacctgggaagcaggggttgcagtgagccgcgatcgcgccattgcactccagcctgggcaacaagagggaaacttcatctcaaaaaacaaaaaaacaaaaacaacaacaaataaaacaaattttctaaaatgtagtaattttaaaccctttcaacttctatgtattgaatagcattgttattggaacgaattttatttttaatagtgatttatatatattttattaatacaactagtacagatgttgggggctgaatgtatttcatacacaatttgtgatgtttacatgtaagtaagtattgatatatagattaaaagcttatcaatttccctgggagatacccagtgggcagcattcctggaacccagttttagactgaagatcccctcactgcagtacaactaaattaaagttacacgaaattactgcaagaaaatgtagccgttgggaattgctgtcaagtcttgtgaagtctcagcctagtagattttccatttgaactcactctttctgtgttgtataacactattttgtcttcacaatcagttacctaattaataaaacatttagagcttaatttaattatatataaacatcgctcatttcccgcaggattattagaaatactttaaattaaaaatataaacatgagaaccccagagaagaatagcttcaaataataggcccgaagtagtaaattaattttattgcctaacactctatattccattagtagtttacttaatttcactttttaaaaagtcctctgagaaatggatagaaattatataataagattgaaactcagttgtgctccctttaaattttctttaacagttctatttatcagtagtatatatttaaccaaatactttatttcaagtactactccatccttccccatcattttatgatgacaaaggcttggttatatttgtttgttgcatccagtcattctccaaaatgcttatgcatcacttcctttgaatactttttattggattattatattcagggtttaatggcagatcactgtatccatctagatctaccaagaaataaatccactgaagcaaaaattgaaagaaatttacaaaaaaagactcttcaagcattaacattaaagtagtaaatagggagaaaatagaatataatgttatgtagattgatcaacatatcttcctaagattaattagaaatattaggaaggcaagaggtctgtaagtaggaaaagggacttagaggggagcatgcaaactatagaatacagttagcttaagttttaggaaaaaaaagaaaggcaggaaggagaatattaaactgaataaaatatagattgaatgaatataaccttaggcatgagagttgtgtaacatatgttcaaaaatcaaggccaataaccagtgtaaaccttgatatgcatgaaggtagaactgggaattttcttttctaaatgcagaaaatatattgtataaaagaaaaaattatttggtgaatatctgcaaaactaattactaggcctaattcctaaaaacccactttatgaccatggtacatagcttatctgggacttactgttcttatctttgaaataagaagcttagattgcatgaacctgaagctgttttgagcacaattaattcatcctgttatgaagaagagagaaaagtttcagaaaacctagattagagatgttgtgcttatttttatttttctttatctcattctgtccttcttccctctcttcctttcttcctccccactcccttcttacctctccactttgtttttctacctcagcccctacttccttcctttctttaattcttccattctttcttcccttctcaatagataagtttaataatagtggttgttttgttgtagatgtttcagggggaaaaaatttaaaaggttgcacagttcttgtcagaggtcacaggaatgcttgagtctggatgtggaaggggcttcagaagtcatgctcagtctgttcctggaaaacagcagcacctaggaaaccagctgagaatgcttctgcagctgataatgagagttgctttatccagacgcattcacatagggggagagcagctgacttattttgtaagccttcctatatgaaaaccttcaaattgcttaattatgctgatataaggagattatgaagggaaaataaacaaaattaattcatattatttgggagagagctgggataatttttaaagatctacactcaagcaaaataaatttattaaaggcaaaaaagaaaattatctggcacgaattagttgtatcgtgcagcagtaagactgctggatacaaaaaatagcaacctaagttcgtagagcaagacagacagcaagctgaaaaattataccacccaaaatggaataaaacaaatggtaccccctgggataggaaggcagacacttaaaggcattcatatatgcattaattatattattatgtgtggcagtgcaaagccatgaaaagagagaaagacttttaatcactctgtgctccaggacggagctataccatgtgtattcacatctgccctaaattacagtgaaatacacagtgcaagtaactgtgacatacaagaggactagaacgctgtcttgcattacatgtcatcaattttgagtcaggttgggatgatctatatccctagagagaaaaagttactctagaaaataactttttgaagccctagaagaggggcaagaaattctttcttctaatagttttctttccatttcttaaaaagaaaaagttggatgctggggtgattgcagaggagagaaggaatgtagggagagagtaaaattgccaattaaaatcaagatgcccagtaaactttgacaaatattttttagtacaaatatgttccaaatattgcatgggctaacgtgtatactaaatactatatatatgttgtgtttgtgcctatattttaaaattaaagttttaaaaagaatattaattgtttaatactcaagtttagctgggctcctgaaattttcccccactaaattaagcaatgctaggagagaggcagagactccatctgctaagcacatgagtattctggttttctttttgattttataacagaatcgaacaagcatttacatacacctactaactcaatgagaaagtataataaatactactatgaaagtattgaaaaaaaaaactgtgctttcaagatactcactatatttgtagttctagactgagtctagttctatacctgagtctttcagctgggataattacttcaattcttagcttcagtttggaaatggtaatctgcttctttttatttattgatgtggttggatagaatagtgttccaaactaggtaagtatctaaaaatggcaaagagggcatattcaacagctgatgaactgcaaattctctgaagataataacaacaaaagattcacagaaaaacaaactgatctctacatatcttcccacaaagtattttgagttttctcaactgtctggtatgaatacgtttttgtaaataccatgaaagaagtgcattaaaaatcttaatttaaaaaacttgctgaaaatcaatgtgaattataatggctgattgctatgatttttaaatatattgagactatctttataaaatgctttatacttggcaaaaattcacttaattaaagtctgaaattgaatatgaactccaaatgtatatttatttttgttcattctttatagaaatagaagtgtagctttgtgaataatttttcattcgtagtttgcaagacatatcaagaaatctgaaggccagaaaattcctaaagtggagttgcaaatatcaatttatggagtaaaaattctagaacccaaaacaaaggtaaggctttttttttaatgttagaggcaatctttaattaattgcaattatattcctactttaacaaatatttaaaattttttgccaccctgaactgtttagttctgagttaatgacagttcgaaactctaggagttttagaagtgaaaacaacttttggaattgcattataagtgatcttttcttcagcttgtttgggatataatattaataacttatgttaagtgcattcaacagtgtttggacgtgtatttgggaatgtttttttcatgagatgtgaaagagatgcatacagtgtggttcactgagtatgaaagaagataaaagctgtgtgttattaaaatattctgcattgacttttatttcctgtagatgtaatcagtgtgtattagttttttacggaggctgaaacaaaacaccacaaactgggtggcttaaacagcagaaaatattttctcacagttgtggaggctggagttccaagatcaagatgccagcagggttagtttcctctgtagcctttctccttggcttacagagggctgccctcttgctgccttttcacacttgtctggtgtctcttcttataaggacactcatcaaattggattaggaaccatactcatggccttattttaacttagttacctttttaaaggccttatctcctgtttgaagaaaaactagacaaattaaatttagcagagtttatttgaacagataatgattcatgaatcaggcagcacttgaaaccagatgttcagaaaggtttgcccagcagcgtgaacatggagctttttataggctgaacacagactcaaaggtgacaactcacctgattggctatagcaaggcatataccttatatggatatgtagtgatgagctggctgcctgtaattggctgaaacttagctatgtgttatacttccaaattagtgttcagtttatttacatactagttaggttgcagtttgttgtataggaactcaaaatacacagacaaccctaggtgaatggcctcatgcttatttaatttagcactccaaccacagtctcattctgaggtgctggggattagagcttcaacatgtgaattttggggaacacaattcagcccataatacagtgtaaacttaagtttcttgtatttaggacccttcaaagcaaataaaatatttaaaaataaaatctgttctggattcaaattcattaacatatacttgttttggactaaagtgtttccttccaaaattcctgtgttcatgccctaacccctaatatgactatatttgaagataaggccttcaaagaggtaacttaggttaaatgagattttaagggtggggcctcatccaatatgtctagtattcttacaaaaagaggaagagacaccagggatacgtacactcagagtaaggaccacgtgaaggcagcaatctgcaagccaaagagagaggccccagagaaaccaaacctaccgacaccttgatcttagacttctaacctgcagaactgtgagaaaataaattcctgttggataagccacccagtcagtggtattttgttatggcaggcttagtaaacaaacacagtactttattcacaatgcctcagagttatcatttagtaattttgataagaccatattagtcaatttggaaaaattaatatttaactccaattattttataaatacgtatcgtcaaagtgttcttctaacaccataggatacatattgacaaattaattcagtataaaagccaaaagaggaacttctggcctgttaacagattatgaaaaatgtttcccacaggtctgcaacttttctctagtccagcaagtgtctttgataccttcatctatgtaaattccagttcccagcaacaacttgctatttaaagtgtggcctgcagaccaccagcaactgcatctattggatgcttgttagaaatgttgaatttaatgccccactacagacctacagaatctgtatttgcaattaaagaagaaacctagtgtttcgcatgcacattaaagtttgaggggatctgctgttgtgcatggtttagtggcttaatgcggtaggcctcattttcaaattgtagcttatggaatagcgacataaaaattaactgaggcatttgcaaaagtaatttctaaggccccaaatttgcccccagaatcagaacctctaactgtggaaatctgtagtaaagatcaatggcataccttcaacttcccatattaaagagcaatggcattcctttaaacttttcaagacgtgaatttaagtcctctcaacaattatcctgtctaatcttctctattattcaccctcaatattcaattacaaacaaagatgtgaagatttactttagttacggcgattctaaaataactactgctaaggtggctgaaaacagaaaaatgaaatggtgaaaagatagtagagggttgattcaagcatataatgggatatatgtagtttgctgggaaacaaggcaattgaaagcaaggtatgaatgagataaattcattaggcaattagcagttacataaagaacaatagaccaaggaagcaataaattacagaaggacaatgcaatcaaaagtgtagcaacaaagtgtagtcttatgtgtcatgaaaataagaataatcctattcctacatcttcttttcaaaattaaaaggatatagagtggtaaatgtccagccggaatagggtatttgtaggccatgcttatgttgaaagtttttttctacaccatatgaattaggtagctgttttggagtgtgtgtacatgtttgtgtgtgtatgtgtaattaatattattttcaatttcttatctgaaggtttggggcttgtcccagcacacattaaaatatataaagctgataatatactttatgtatcattttcgtatgttcttgttattttttatttgaaacgacctatggtatattctaaactctaataatttcactacgttcatataccataatttaccaaattattcttctattattgaacatatggaatgtttcaaattttttgttagttgataatcacgtttaaatatttacaaaatacaaacacaattaaatgcagtatgtagagaaaacttttttgggttttagaattcacaggttaataatggcatgtccttagaaatgcataaaatgctaattgcttaaagcgctacaagatggctaccactaactaccgctacaagatggctaccacctacgtttatagggtatgtgtgtgtgtaaagagagacgaaaatggatcatgtaatgcaaatgtggcatgatgttaccagttggctaggtgaagagtatatgggtatgcattgcaaccttttctattattttctgcatgatttcatctgaccttttaaatgagactatttgttccaatgaaagatatgtgaactggctgggtgcagtggctcatgcctgtaatcccagcactttgggaggccgagatgggggaatcatgaggtcagcagtttgagaccagcctggccaacatgatgaaaccctgtctctactaaaaaaaaaaaaaaaaaagtagctgggtgtggtggtgggtgcctgtaatcccagccactcaggaggctgaggcaggagaatcgcttgaacccggtaggtggaggttgcagtgagccaagatcgcgccactgcactccagcacaggtgacagtgtgagactgtctcacataaaaaagaaaagaaagaaagatatgtgaaaagctcttttaaagacttaatcaacaagttaggctatcatatctgtttggtttttcttccttggcttcctgaccacttgaagaagaaacctacctttatgaaacccaattgaccaataacttatgatttattaggttattccttatacctgctctcctgattgttggttatttacctggaataaggataattttttttcattaactttaaatatttgtaaatacaaagacagaaataccaaactttttttaaaaaatagcgtatgatactgtagagtgaggaaaaaccaaagtgaatagggtcaaaaattaagctgggcttagaaaaagtctgtggtacagcaacagtagagaatagagaacccaaaattaaagctgcacacctacagccatctgattttttgacaaagtcaacaaaaataacagatggggaaatgattattcaataattggtgctgggatacctggctagccatatggaagagattgaaactggacccttacctttcaccatatacaagaatttactcaagatggatcaaatatttaaatgtaagaccttaaagtataagaatcctggaagaaaacctaggaaacaccattccggacattgcccttgggaaagaattgatgactaagtcctcaaaagcaattgcaacaaaaacaaaagttgacaagtgggacctaattaaattaaagagcctctgcacagcaaaagaaactatgaacagggtaaacagacacctacagaatgggataaagtatttgcaaactatgcatttaacaaacatctaatatccggaatctataaggaacttaaacaattgaacaagcaaaaaataataataacccgattaaaaagtgggaaaaagaaacaggaacaggcccttctcaaaagaaaacaaacaagtggctatcaaacatgaaaaaaatgctccgcatcactaatcaaagaaattaaaatcaaaaccacaatgagatacaatcaccaccatgcagaataactgttattaaaaagttcaaaaataacagatgctggtgagattgtgaagaaaagagaatgcttatacactgttggtgggaatgtaaattcgttcagctgctgtggagagcagttggagatttctcaaataacttcaaacagttaccattttccagcaaccctaatgctggttgtatatacttggtatatatccaaaagaaaaataaatctttataccagaaagacatacactctcattttcatcgcagcacttttcacaatagcaaaaacatggaatcaacctagatgcctctcaatggtggattggataaagaaaatgtggtacacatacatcattggaacactatgcaaccatagtaaagaatgaaattgtgtccttttgcagcaacatggatgcatctggaggtcattatcctaaatgatttaatgcagaaacagaaaaccatataccatatattcttacttataagtgggtacttatactgggtactcatggacataatgatgcaacagtagtttctgggggctaccagagggagaaggaaggaggggataagggtttaaaaacaaactcttgcatactatgcttagtacctcagtgatgggactatttttacccaaaacctcagcatcatgcagtataccctggtaacaaacctgaacatgcaccccctgaatctaaaataaaagtttaaaaaagtctgtttggtgataaaacaaaacaaaacaaaacaaacagggaaaggtagtaagaaagtagatgattcccacctactatttttattgcggaaaatcatattttcaggtttctatcaataagtttatcacatgacaacctattatataattctgtttcttaagcttttaatatcaaatctgcatgcttctcccaacctaaacctcctttacaaaatatcagtgaagtggggttcaactcaacatgattagccagttgacttcattatcctatattgccttaccaaaatcaataatgccagtgcttttctttcctgtccacaagtctcgatttcctattattaagactttaatatttaataataaattgttattaataattaatattcaattagtgtttaatattaaattggtaatatttaattatttaatattaaagtaattatttaatgtttaaattaatagtaaattactagttaatattaaaaattaatttctattttttctgttatttatttctactcgttctgtttttaataatttcaactttcattttagattcaagagttacatgtgcagatttgttacctgggtatattgcatcatgctgaggtttggcatatgaatgattccatcacccagatagtgagcacagtacccaatagttagtttttcaatccttaacacccccttttcccatccactttaaaagttacccagtgtctattattgccatcattatgtccacgagtacccaatgtttttcacttataagtgagaatatgcagtatttgtttttctgtttctgcattaattcgtttaggataatggcctccagcagtatccattttctggaaaggacatgattttgttctttttgtggctgcatggtattctgtggtacatatgtaccacattttctttatccaatctaccgttaatgggcacctcggttaattacatgtcattgccattatgaatagtgctgcaatgaacatatgagtgcatgtgtctttttggtagaaagatttgtctttttatggatatatgtcaagtatgtatacccagtaacagggttgctggaaaacagcaactgttttaagttccttgggaaatctccaaacttctctccatagtggctgaactaaattacattcccaccaatagtgtataagcattccctttttttcatatcctcaccagcatctgttgtttttgactttttaataagagtgattctgattggtgtgagatcatatctctttgtggtttttatttgaatttctttgatgataagtgatgtggagcatttttttcatgtttatttgcagcttgtttgtcttctttagagaagtgtctgttcatgtcttttgcccactttttaatatggttatttgttttttgttggtttaattgtttaagtttcttatagaacctgggtattagacgtttgttggatgcatagtttgcaaatattttctcccattctgtaaggtgtctgtttactctgtttgatagtttcttttgctgtgcagatgctctttaattaggttccacttgtctacttttgtttttgttgcaattgctttttggaacttagacaaaaattctttaccaaagctgatgtcaagaagggcatttacattattttcttctaggatttttatagtttgaggtactacattatttaatccatcttgagttaatttctgtatatggtaaaaggtaggggtccagtttcattcttctgcatctggctagctaggtatcccagcaacatttattgaatagggagtcctttccccattgtttatttttgttgactttgtcaaagatcagatggctgtagacttgtggctttatttctgaattctctattctttgccattggtctatgtacctgtttttgtaccagtaccatgcttttttggttactatagccttatagtacagtcatcgggtaatgtgatgcctccagatttattcttttggttaaaattgctctggctattcaggcccttttttggtttcatatgcagtttagaattttaaaaattctaattccctgaaaaatggcattggccatttgataggagtaacattgaatctgtattgtttgggcaatatggtcattttaacagtattaattcttccaattcatgagcacggaatatttttccatttgtttctgtcatctttgatttttttccacagtgttttgtagttcttcttgcagaaatctttcacctccttggttagatgtattactaggtattttattttttttgttgactattggaaataggattgcattattgatttgtctctcagctttaatgttattggtatacagaaatgctactgatttctgtacattgattttatatctcgaaactttactgaagttgtttactatcagttgcaggagcctcttggtggaatctttaggatcttctaggtagataatcatattgtcagttaagagggatagtttgacttattatttttttattttgaagccttctctttttttctactgtctgattcctctggcaaggactttgagtactctgtggaataggagtgatgagagtgggcatccttgtcttgttccagttctcaaggggaatgttccagcttttgccggttcagtattatgttggctctgggttggtcatagatggctgtactattctgaagtatgttccttcaatgcctagtttgtacagggattttatcatgaaggaatgctggattttttcgaaggctttttcgacttctgttgatatgatcatatggtttttgttcttaattctgtttttatgttgaattgtatttattgattcgcatacgttgaacaaaccttgcatcccaggaatgaagccttcttggttgttttgaattaattttttaatgtactgtggaattcagtttgcaagtattctgttgagaatttttgcatctatgtacatctggaatattggcctatagttttcttttttcactgtatctttgcaatgttttggtatctgaattatgctggttttgtcgaatgagttagagagaggttccttctcctcagttttttgggaatggttacagtggaattggtaccaactcttctttgtaggtatagtagaacttggctgtgaatccatctgctctggggctttgtttggttggtagattttttattactgattcaatttcagaacttgatattgttctgttcaggatttcagtttcttgctgattcaatgttgggaggttctgcgtttctataaatttatcaatttcctctagattttctagtttgtgagcttcaaggtgttcgtaatagtctctgaggatcttttgtatttccgtgggatcagttgtaataccacctttgttgtttctcattgtactttttggctcttctctcctttagtctttgtttatgtagctagtggtctagtgatcttgttgatccttccaaagaactaacttttgggtttgttcattgtttttatggatttttttctctcaatttcattcaattccactcagattttagttatatcttctgctagctttggggttagttgatatttgttcttctagttcctctaggtgtgatattagattgctaactagtgatctttctaaatttctgaggtatgcatttagcactaatagctaatttttaagagccctacttgaattctattcccagaagtgagtttttaaaactcttaatgaaaaagaagcatctctattttaatccctaccaaacctggggagcaatcttggagtttaaaaatccttgagatattttatacattcaattatattgcatattaatatagaacaactatttaccctatgttacatacgaatatagagtatatgactatttacccatatatataaagtaccatttcttgaatgcattaaaaatgtaggaaatctaaaaaagggattaaaaagctctgctgagcaccagtgtccccaaaacattcctaagaatgctgattgcggtatgtgtgtgtgagtgtgtgtgtgagtgtgtgtgtgtgtgtgtgtgtgtgtagtgagagagagagacagttctcagttcttggatacaacctattcatagacatttacagacatgcatttagaaactactattcaaggacatatacataagtgacacacaaaaaaatcaatcatttcattctagatgtatgttgatatttagaaaaaaacaaatgtgatacttctaaaataaatttatttatagttaaacatacatatatgagacaggatttttaaatatattattaatctaacatggactgtctttatacagaatagaatctttatttttttttcacttggatgaatgaaaatggaaagtgaaaattaagtgaaagcaatctcaataacaattggctcctctgtctttctgtgtcctttccctttctgcttttctcacgtgtcctccaaatgaagattatagagtgctagaaatgagagtaaatgagagactatgtagatttcagcaccagctaagtgaatgttgtgttttgcatgttactcataatttctcccatctatggagaaatgaatttttttcctatagtgtttagcagtaatattttctctttatttatcattaacatgcttttacaattaataagctgttatagacctcctgtcagtatttgggagctatcgtgtaacagagagctgttatttaattgactatattgtcattaaaacaaaaaaaaatcaataagaaaggaaactgttctaataggcaaaatacagaaagaagatagtctcaaacaaatatgatcattgtccatcgatgctttctgtataagaaaggaaagatgctgccatcaaaagctaagtaagtcaagcacctcttcttagacttggttccccctgcttttaaacagatgaattaggctatctaataatgccagtaagcattacaatcctacaatatacttccttattttaattttcatacttaccaagcaactcttcgatggcttaccgtttggtttaccattgtatgcagggaaagaatgctttgctatggacagttctcttagcatttatttgtatatctcattttatatattcattttcagtctgacgagcagttatttgaatcagagtaatagagcaaatctcagcaagctgacacatcaaactctgaactgagaagtttaaatgttttcatatcaatgattcttatcttgaacaaaatctctgagattttgattcaactgaggtaaaaacagtgtaaatttttatagcaagcaccccaggtatttgtgctacacgttgtctgaagccacctttagagaaactcttctagttataacctaaaataaagcttttttgggggatattcagccagccttccttagatgaaactgtagttgcttccatctccaatcttataaaacacccactcaataatcttggtgaactgactttctgattgatatttctagtgttacagtgtatcttaggaaaatatatttatgactacaacagaaaaaggaatagttgatttttctacttgtcataatcaaaaacattgaatttcttttctacctccaacatgtttcagaagactgtgaagaatgaataattaacacggatgatctatatgaatataaaaagtgtcaaatgctccatcttttgactaaataatagtaattatagaaacacatttattttatataaatatttttattttaatgatgtatataccttctattttataagttttataatttaatatgtgtgtgtgtgtgtgtgcgtgtgtaaatatatgctgcaactatatcgatctggttgcagtatttgtcttctactgatgaatagatttgactgcgtgatttggagtctggatatgtataccattcatttattgcttcatgaaaaatgctacagaagttccaaagatgagcttcctagacagaacaggttcaagagtgtatgagttaccatgaaattatataaaataaaatttaataagattactaaggatgaaatgatagtgtgtttcacatgaaatcgtatccagataaagctgtgttctaaactataatgctagtaaacagcagtgagataaaatgagaattgctctggtttaaaagagttctggtaattctgtaaaactgtgggggtgtcttattctttctgggtctcattgttctcctctgtaaacatgcaaagtttaaagtatatgatttctcaagagccattgtagctcagataggccataaatctttgatcattttgtactatgcttatgttttgctcagcactactgaaatgcatatcttagtttcatcctgaatcaggaggtctatctgtatccattatgcctttgttttaggttggggtgtacataattataaaatcaaagattgacagatgattgttctacttttaaagtcacatgttattaacacaaacgagtatttcagaaaatgaaaaaagaatcccatcaactatgtttatttccatctgtgttcacaggaagttcaacacaattgccagcttcatagaatatctttttgtgcagatgataaaactgacaagaggatattcactttcatatgcaaagattctgagtcaaataaacatttgtgctatgtatttgacagcgaaaagtgtgtaagtatcccagatgttgtagggtggtttgttctgttttataagccaggaattgtcttgcttctggcattggcaaagtatttgaaaatgaataattttctgtaaattattctgtaaaaagtctgtaaatacttagctgtactaatagatttattttgtcatgagaatatgcttcaggatttcatctgtaactaaattctcatggtcatgagcataaacttacatgtaaatttcttttattagaatgccatgcctgcttatgttatgcatgtattttataataatttaatctattttacaattttaaactcaaatatgatttagtattatgcacataatacaaacagtagtggtgagcaaacgtgtgtttcccccacatgtgcagaatatgatggattttatgaaaataaatattcttaactccaggaaatatgatctatatggttccttaaaagattttccaatacactgaaaatttagttccttatgttcattgtataaaaatcttaggccaggcgcggtggctcacgcctgtaatcccagcacttcgggaggccgaggcgggcagatcatgaggtgaagagatcgagaccatcctgaccaaaatggtgaaactctgtctctactaaaaatacaaaaattagctgggtgtggtggtgtgtgccagtggtcccagctactagggaggctgaggcaggaaatcacttgaacctgggaggcagaggttgcagtgagccaagatcgcgccactgaattccagcctggcggcagagtgagactccatctcaagagaaaaaaaaaaaacaacttaaaataatgaaagttaatggaattgtatgtatgaaattctatgttaaatcctgtagcagttctttaatcatctggaatcttaaggaaaacccactggtggctgcaataaaggaaaaacatgtaacctcaacaattttattggtttagataggaaataaaacaattcatctgtttgctaatttttgctgctgtcaaaaataacagatagctaatattattatcactgttatgtcatttgtttatctagtttcagtattgagcttcttgagaacaaatacctttttatttgttcatgtgactcctacatcaagtggacaataggtgctcaatgaaacattccttaagaaaaagatcacattgaaaagttacaaaaaatagagcaagtttttatttttattttttaaactgtagttctctagaaaggaaagctaatgtgctaagctactagatatcataataccttttgtgaattttgtgcacattatggaacatttcatcagaaaaaagatgcttagcaatataagacaatattttgtgcacaataagacattttatatagctcaaattgattttgaattttattttatatgaacttctgatgaatgaataaataaaatttacatatttcaagtgttttttaaccatgattgcttgcagattcttttctctatgactgagaagattaaagttgatatttgttgaatatcttctacacataatttataataaccttttaccacctacataaagcagtaaactcagttattcttctttcctgccttacccatagaaataaatttccttaaggtcctttgaaatgtttcagagtcagagttcattctaaatattggccttcttatagatttgtgccatttgttttatattctttgatccctatccaaatttgttaaattaatatttaaaatataagtttgccaccttaaaagcatagaccccatttctttttgatcataactgtctgtaattgattgttctccttggatatagcgtatcaactattttctcttgttgtgcgcatgtaccctaaaacttaaagtataattaaaaaaataaataaaaaaagattgaaaataatttcttgaagcctaagcagtggttcacaatcattaatgtacataaaaatcatacaggatgccttttaaaagctattatcaattggggctggagctcaggaaatctatatttatcaagtataccaagtgattctgctgcaggtagaggaagtcttggctttgagaagttcccagatacctcccaactataagttggcatcaccttcctgtgctgaaaaaggacgtttcctcaaaattttgttatacctgcactatcttaactatgaggttttatcagtgctaattataatgatgactatatttataacactgatattatatgtatgcagaatttttgatatgccatcttatgtaattctcattttaaatagtttagcatagagtgttaaaatgggaaataagttatggcctatctcatacaactctcctcctattttaaaaaaccaagaccagagatgttgaagtaagtttcccaaagttacaaagctaagtagtcagtagaatcaggactaaaatctaagactcataattcttattgctacatttatctcatcatgctatattactcccataactgtggcctcctctagagttcatctgctcttattggggactttatctgttcattgtattttatctttttagtacttctttgaaattgagattttgaaagatgaaaccttttttagtaaggcacaagactggaattcactactttattaacagtatcatgttgtattaatagtcctccttcttccatggtgacagtgaggaccattcaaccctgccaaattagaatgctgaatgacaacatttaaccctgccaaattagaatgctgagcttctatacttaccaggcaataagggggcagtgcatttccaccctcactctcctactggaattgcatctgatgaagccacctaaagcagaaaatttaaataatttccagtatttcataaaatgaaaatcactcttcataccaagagacaggtttcttaaactaaaaaggaaatgacagtcagtagttaccaacacatagatgtcagagatattataattataggacaaaggttttagaacagccatcatataacacaataaaatgagcagttacaaacacacatgaaacagatgagaatgtagaaaatcttatcaaacagaaaatctaagcaaagaaacagaagatatagcattaggagatatacctaatgctaaatgacgagttaatgggtgcagcacaacaatatggcacatgtatacatatgtaacaaacgtgcatgttgtgcataagtaccctaaaacttaaagtattattataataataataataatactaaaagaatactgaaaaataaagtaatgacatgaaagacttagtgtatggactcaacagcagaatagagaggtcaaaggaaaagaatcaatgacctggaagactgacaaatagaaaatacccaatctgaacaagacaaagattatagactcaataaaccaacaaaacagaacctcatggactgtgggaccgtaacaaaatatctaacatttgtgtgtcatctgagtcctggaaaaagagaataagcacccttaaaaaacactccaagaatattagttgaaaactttcccgatttgacaaaggacatcaacctatagatctaaaatactgagtgatctccaaacaggattaatccaagtaactccataccaagacacatcatattcaagcttctgaaaactaaagacaaaagaaaaatcttgaaagcagcatgagataagcaagtacttacctatagcagagaatgtgaatggcagtgtatttctcaccagaaaccatgaaggcaagaaggaagttgcataatactttttgagtaatggaaaaaacaaaagcctgtcaaatgatcctatatccagaaacatattcttcagaaattggaaagaaattttaaaaaattattagatgaatgaaaattaagattgtttgccactactagatatcctaaatgaatggctaaaggaagttctctaaatggaaaggaaacaatacaaaatgggaacttggagtataaggaaggaaaaaaaaaacaagatgagcaaacatatgagtaaatctttagttttctaaattgtgtttgatagtagaagaaaaaatactttctgatgtgattttaaatctgatgtgatttcatatatggacatgaaatatgtaagccaattatattaaactaggaaagttaagaggatgtaaaaagggaggtgaggtttctacacctcacatgaactggaaaaataatagcgctgggtaactatgataagttatatagataaaatgtgaatccaataacaaccattaacacgttgtataatgagatacacttaaaagcactatagagaaattaaaatgttatcgttttaaaagcccatagagatgcaatgaaaagaaaacagagaaagaaaaaagataggtaacagaaaagaaaaagattaaataatgtacttaagccctaacatatcaaaaatcacattaaatgtaaatggtctaactacaccagttaaaatatgttgttaaggtggattacaaaacataatccagatacatatcatctacaagatgttcattgcaaacataatggtataggtgatataggcaggctaaaaatgaaagaatgaaaagagagttttcatgcaaccattattcagagaaagcagtagtaactatatttacatcagataaagtagacctcaaggcaaagaaaattaccagagacagaggaggggcatatagtgataaaagggaccagttcccaagaagatatggtaatcctaactgtgtattaccaaaaaatagagctgcaaaatgagaaacaaaaacagatagaactaaaagagtaaatagacaaatacgcaattatagtcgaaattttactggcactttccctcaaatttatagaataattagaaaatcatcaaggatatagaattactcaacatcatcaaccagtgggatctaatgagcagttacagagaacctcacccaacaacaacagaatgtacattattttcaagtgtttgaggaagatgtaccaaattaagtcacatcctggaccataaaataaatcttgaaaatttaaaagaattaaaattatttaacgtttctctgactataaggaaatcaatctaaagatcagtaacagaaagccagaaaatctttaaaagctaggaaatgaaacatcatattcataaatattccatacattaaatagcgattcacaaatgaatttttaattttgcgaattgaataaaaatgaagtagagcgtatcaacatttgtgtgatataactaaagcagtgctaagaaagaaatctgtaactaatttaatacattaggaaagaggaaagtctcaaatgaataatctatgttcccatctcaaatacacagaacaacaaaaatatcaaaataaacctcaaagtaagcagacggaagataagattaataagagaagaaattggtgaagtggaaaatacagaaaatcaatgaagcaaagacctgattctttaaaagattataaaagtcacaaattgtattaatttggcaaagaacaaaagagggagaagacacaagttaccaatatttagaatgaaaaccaacagatttcactacagactctctgaatatcaaaagaataagaggatcctataaagaactttacacacacaaattcaaaaatacaaataaattggatcaattatttaggaacaatattaccacaaatcactcattattaaatagattattttaatagcctgataactataaaggaaattaaatttataaattaaaagttattaaaagataaatctccaggtgtagatggtttcactggagaattctataaaatgtttaaacaggaattaatgctattctatacaatccattccagtgaaaaataagagggacagaaacactttctacttcattttgtgaaactagtatttctctgataccaaaaccagacttagacaatgaaaaaaaaaaaaacactagagatctgaattcctcaggaacataaatgtaaaaattcctaaggaaatataacccagtaatgcattatattagtcagggttctctagatggatagagctaatatatatattggaagtttattaaggagtattaaactcacacaatcacaaggtcccacaataggcccatctgcaagctgaggagcaaggaagccagtcatagtcccaaagctgaaaaacttgaagtccaatcttcaagggcaggaagcatccagcacaggagaaagatgtaggctgggaggttaagccagtctagccttttcatgtttttctgcctgctttatattctggctgcaccagcagctgattaaatggtgcccatccagattaaaggtgggtctgccttttccagcccactgactcaaatgttaatctcctttggcaacaccctcacagacacacacaggatcaatactttgcatccttcaatccaataaagttgacgctcagtaataaccatcacatgcattaaaagaattatatgcaaaggttaagagtagtttgtcccaaggatgcacattttgctcaacattcaaaaatccaatgatataatcaaccacatggaaaatctaaagaagaaacgtgataataccagtcagtgctttaaaaataactttaaaagagaatgaacacacactcattgtttaaaactctcagaaaaataggaatggaaagaacttcctcaatttgataaagagcatctaagcaaaatacagatattttactttatggtaaaaaaaagtatgctttcctcctaagacatggaactaagcaaaacttttcactctcttggctcatatgaaacacagccatagaagctctagccattgcagcaagacaaaaaagcatataataaatttgcagattgtaaataaagaaataaaactgtgcttatatgcagatggcatgattgtctaagtagaaaattttgagtctaaaacaatttctggatttaataaatgagtttagccaggtggcagaatacataattaacatacatggatcaattgtattgctgtatactagtagtgaacatatggatacagaaatttacaattgctaaaagaagtggaatacataggtataagtctaaactaagaagtgaaatttgtatgctgaaaattcatgtgcaacaaattgctgacaaaagaaatgatagaatctacaaataaatggagagatactattttcagttcttcatactgatgtatagatttaacacaattcctgtcaaaattatagcaaggttgtttgtagatatagacaagacaagattattctaaactttatatggaaaagcagaggaactggaatcactaaaacaatttcaaaaaaagagcagtgaagtgaaagtaattcatctaccctgtttcaagacttattagatacctttactaatgaagactttagttttggtggagggaaagacaataggtcaatggaagagtgaacatataaattaacacacagaaatatgcccagctaatgtttgtcaatgctgcaaaagcagtgcaataggggaaagaaggttttgttttgttttgttttgttttgttttgttttattttgttttcagacagtgctggtgcaattggactttcataggcaaataaaatgcaccttgacctaaacctcacactctatctaaaaattaactgaaaattcatcatggacttagatataaaaatacaactataaaacatttagaaaaaaaacacatgggaaatcttcaggatgtagggctaggaaaagagttcttagaattgacatccatagcaggatttaaaatgggggaaaatgatatactgaacttttgaaaacatttttctatgtataagtgctttgttccatgtcttaggaaagcattctttttttatcataaagtaaaatatctgtattttgtttagatgctccttatcaaattagggatgaaaagacggggagaaagtattagcaaaccacatatcagacaaataactagtaaaaaatcattcaacactcaacaatatgaaaacaatgaaattagaacatgaacaaaagacaacaagatgcatttcattgaagaggatatacagatggaaagtaagcacgtgaaaagatgtcaaacattggtgtccattagggaaatgcaaattaaaatcaaaataagatattactacagaattatcagacaggctacaataaaatcaccaaatgctggtaagaatggggaaaaagtacatcattcacacatagctgatggagatataaaatggtatggccattcaggaaaaacagtttggcagttttataagaaactgaacatgcagctgtcctatgaaatacttggacatttatcccagagaaatcaaaacttaaaatgttcacacaaaaacctatacacaaatatttatagaagcttattcataatagccgaaaactacaatccatccagaaaatgtgtgaagggacattacttagcaataaaaaggcatgaactattagacacacaacaatgtggatgactctccagagattaaggaatgcaaaaagtctatctcaaaagcctgtgtactctatgattccatttctataacattcttaaaatagcaaaattaaggaaatggagaacaattagtgattgccagaggttaaggagatggtgagggcaggctagaagaggatgtgcttataaaacagcaagatgaaggactcttgtcgtaatcaaattattctgtattctgactatattatgaatatcctgattgcaattggtactatagttttgcaatatattatcattagaataacctggacaaaggatacacaagatctctctgtattatttctcacagctgagtgtaaatctaaattatctgaaaataaagtttactttaaatatctgaaaaataaagtatggcctatttggaccaaaccttttgtcttattttaagtaaatgcaggccaaaaagaattagtttctttcctagagtgacaagctagatagaaacagaatttgaacttagaggaaggcttaccttagcatactacaaaactagaacagagaatttattgtgatatggttgatttttattataaattaaatataattgctgtcaactgtttaaccattattttgattttctttatttttcacaatttcatttccaaatgttaataaatataccttatttgctgaatgctgcttttaatataatttaaagagtagccccaataaacaaatgaaattatcacacacacattttttaatgatgtgaaaggaactgtaaaataaggcaaagtttaaaacttcatttttacatcttaattaattctccgtaaaaagggttcattgtcaaaagaatcatacattattagtactagaaggaatcactgcatccagtcgttttacaaggtctgtctgtgagaaggtgtttactgcatattcttattatagccatatttcacgtttgctttgtgttaataatttttgaatcacatttatcaaaataaaaaattaatgttttttttatttcattacatgattgagggagagctaatttcttagattagccatccaacttaatgtaattagtttaaaattagaatctggaagcttattgttgctgagtatttcctgccaataccaattttcatgtctccatttcatgaaatactataatttacatatcaagtccctgagtttaaaaactctgaagaattggcttattatgacaacaagcaggagtgaccagctgtaaactagaaaactaattttttagttaatttgtctgaggttcttttgtatgtgattttttaagacaaactttcttttatttgaacaaatttatggagtagatgtgaaacattgttacatggatataatatgtagtgatcaagtcaaggcatttagggagggcatcacctgagtacaatacatttatattaactatagtcaccttactctactatcaaacattgaatttattccttctctctaactgtatgtttgtacccattaacccacttctcttcatcctcctttccccatttattcttctcaggctctgttatccatctttctactctctacctccatgtgatgaaatactttgctttcacatgtaaataagagcatgcaatatttgtctttttgtgccttatttatttcacttaagataatgacctccagttccatccatgttgctgcaaatgatatgatatcattacttttatggccaaataatatttcattatgcatatatacaccacattttcttcatccatttatccattggcggacatttaggttgattccatatgtttgctattgtgaatagtgctgaaataaacatctcagtgcaggaatccctttgatatattgatttcttttcatttggatggatacccagtagtggagctgctagatcaaatgataagtatatttgcaggtttttttttgaaatcttcatactgttttccgtagtagctttagtagtttacatttccaccaatagtgcataaaagttcctttttctccacatcctcgccaacctctgttatcttttgtctttttgacaatagccattctgactgggttaagatgataacattgtggttttggtttgcattctgtgatgattataatattgagcatgttttaatatacttgctggctgaatgtgtgtcttcctccgggaaatgtctattcatgttctttcccatttttttttaaatgggaacattttttttttctaagttgtttgagttccttgtatattctggaagttagtcctctgtcagatgaataatccgaaaatattttctccaattcaaaagttgtttcttcattctgttgattatttatttttctgtgtagatgctttttagtgtaattaagtaccatttgtccatttttgtttgtgttgccagtacttttgagatcttagtcataaattctctgcctagcccaatgttcagtagttttccttagattttcttttaatatttttacagttccagatattacatttaagtttttaggccactttgagttgatttttatatatggtgataggggtccagtttcattctattcaattcaattttcccagcaccattaattgaagaggatgttctttctccagtgtaacttctttttggctttgtcaaacctcagttgactgtaaataagtggttttatttctgagttctttattctattccattattctgtgtgtctgtttttataccaataccatactgctttggttactgttaccttgtatattttgaagtcgggtaatgtgatgcctccagcttggctctttttgctcagaattgctttaagtttgccgtttcttattctgtgatgaatgatgtcagtattttgataggcattgcattgaatctacaggttgctttggatggtagtcatttaaatgatattatttcttatgatccatgaatataggatatttttctatttgtttgtgtcattgactatttcttttatcagtcaataaatagttctctccttatagagaacttttacctccttggttaaatttattcatatatatatatatttattcctatatatgtatatacatatatgtgtttatctctctctatatatatacgtatatatatgcatgtgtatacttattgcgctattgtaaatgagattgccttcttgctttccttctcagctacatcattggtatacagaaatgctcctgatttttgtacattaattttgaatcctccatcttactaaattcatttatcaaatctaagagtttttttatggagcaattaggtttttctagatataagatcatatcagcaaagagggataatttgacttcctgttttccaatttggatgcttttatttctttcttgtttgattgccctgggtggacttccagtaccgtgttgaataggagtgatgaaggtgggcattcttgtcttgttccagttcgtagaggaaaggctttcaacatttcttccttcagtgtgacattaagtgtggatttgttattttatggtatgtttcttctgtgcctggtttgttgagagattgttatcatgaaggaatgttgaactttatcaaattctttttctgtgtctattgagatgattattttttgtccttcattccattaatttgagttaccacctttactgatttgtatatgttgaaccatccacgcatctctggtataaatcccactcaatcatggtgtattatatttttgtgtgctgttgagttaactagcattttgtggagcattttgtgtctatgttcatcaggaatattgaccagtagttttgtttttgttgttgttgtatccttatctggttttgttatcaaggtgatcttggccttatagaatgagttaagaagaaccctgttcttcaatgttttggaatagtttcaggattggtattagttatttgcatatttggtagaattttattgtgaatccatctagtcccgagcttttctttgttgagacagtttttattactgattcaatattgctactcatattggcctgccaggttttctatttcttcctgattcacttttgttaggttgcatgtttccagaaacttacccatttactctagattgttcagattgttcagtttgtcagcatatagtttttataatagtctttggggatctttgtatttctgtgatcagttgttacatttcctttttcattctgatttagtttatttagatattctctcttcttggttagtctacttaatgatttctcaattttacttatttcaaagaaccaattttttgtttgtttgatcttgtgtatttttttagtctctatttcatttagttctgctctgatcttttttatttattttataatgttaattttgggttggtttgttcttactttcctagttccttaaggtatattgttaagttgttaacatgttatctttctacaggaattttttgatacaggaatttattgctataaacgttcctcttagcactgcttttactgtgtctcacaggttttagtttatgtttccatttgtttcaagaatttttttttatttccatcttaatttctttgtcaacccaaaggtcattcaggagcatgttgtttaattttcatgtatttgtatattttccaaagttcttattagtattgatttatttttattccattgtggtctgaggggatagtagaaattattatcttttttttttttctaatttgttgagacttgttttgtggcctaatatatgggctatactggggaatgttctatgtgctaatgaaaagaatgtatcttctgcagtttttggatagaatattctataaatgtgtattaggtcaatttggtctgtagtacagtttaaatttggaggtttttgttatctgtctagatgatctatctagtactgacaatggggttttgggctcccccactattattgtattgcagtctatctctttagatctagaaatatttactttatggatctttgtgctccaatattgggtgcatatatacttagattttttaaaattgttatatcgtctcactggatatattcctttatcattatataatgaccttttccatctttttagaactgtttttggcttaaagcctattttatctaagtacagctatttctgcttgcttttggttttcatctgtgtagaatatctttttctgtctctttacttttagtctatatgtgcctatactggtaaggtgagtttctagaagggagcatatatttggatcatttaaaaaatcaattcattcatactatatatttatgtagaaaacttaatccatttacagtcagtgttattattgctaggtaaggctttgttcctgtcatattgttaattgttttctggttgttttatatatgactttcttctgttattgttcatctttgttgttttggtagatgtctgtagtggtacactttgagtcttttatctttttcccttgtgttatttctttaccaatgagttttatactttcttgtgttttcctgatagtaaatcttgtccatttgtttccaggtttaagacttccttgaacaattcatataagaccagtctagtggtaacaaattccctcagtatttacttgtctgagaaagactttatttcttcttcatttagaaaggagaatattactggatatcatgttcttctttttttcttttagcactttgaatattttagcccattctcttctagtctgtaaatgcttttgctgagaaattcattgttaggctgatacaatttcctttacaggtgactagacgctttcctcttgctgtttttataattctttatctttgactttagatagtctgagtataatgtgcgatggtgactgccttttcgttttgtatctgcttagggatcattgatctttcagtaagtggatatttatatctcctgctagacttagagagttttcatctaggctgggtgtggtggcttatacctgtaatctcagcactttggaaggccaggaaaggtggataatgaggtcaggagtttgagaccagcctggccaatatgatgaaaccccatctctactgaaaatcaaaaattagccaggcatggtggcacacacctgtaatcccagctacttgggaggctgaggcagaagaattgcttgaacccgggagacagaggttgcagtgagctaagattgcaccactgcagcccatcctgggtgacagagtgagactctgtctcaaaaaaaaaaaagaaaaagaaaaagaaaaaaaaagaaggttttcattgactatttcatgaaatgggttttctaatccttttatgctttcttcacccttgggaacactgataatttgaattttcagtaattttaaggtgtcataaatgtcgtgaaggctttcctcattcttttctactatttttatctttatatttgtccgactgaattatttcaaaagatctgtctttaaagatttgagatatttttttcttccacttgatctagtctattatcgaagatatcattatgttactcctcaatgagtccttaagttctagaatttctctttcgttcttctaaaacatatctatctcttcagtatttttctcattcatatactgatttgtttttctgatttctttttattgtttttcagatttcttttgtatttcactgagcttctttcaaatcagtatcttcaattctttatctgggattttgggaatttcttttttattaagatctactggagatcttaatttactggagaattattatgtttctttcaaggtgtcatatttgtttgatttttttgtttcctgtgtccttatgttgatatctgcacatttgtataaaagtcacttcttcctgtttttgaatttactttttgtggggaggatgttgctaaaccactcattagaaatctactaccacgttgctgggcacggtggctcacgcctgtaatcccagcactttgggaggccgaggcgggtggatcacgaggtcaggagatcgagaccacggtgaaaccccgtctctactaaaaaagacaaaaaattagccatgtgtggtggcgggtgcctgtagtcccagctactcaggaggctgaggcaggagaatggtgtgaacctgggaggcggagcttgcagtgagcctagatcgtgccactgcactccagcctgggtgacagagcaagactctgtctcaaaaaaaaaaaaagaaaagaaatctaccaccatgttccaatcacctaccaccaggctccatctccaacattggagattacagtttgacatgcgatttgataggaacacagatccaaaacatatctttctgcctctggtcccccaaatctcatatccttttcacattgcaaaatacaatcatacctttccagcagtccccaaagtcttaacttgttttggcattaaccccaaagtccaaagtccaaaatctcatctgagacaagggaagtccctttcacttatgagactgcaaaatccaaagcaagttaattaattccaacatacaatgggagtacaagtactgggtaaacattcccattccaaaagggagaaattggccaaaagaaaggagatacaggcctcacacaatcccaaaatccagcagggcagtcattacattttaaagctccaaaagaatcttctttgactccatgtcccatatccagggcacactggtttgagaggtgggctcccaaggtcttgggcaactctgcccctgtggctttgccattaaggttcagccctaatggctactctcacgtgctggcgttaagtgcttgtggcttttcaggcacagggtgcaaactctcagtggatccaccattctggggtctggaaaatggtggcccttttctcacagcttcactaggcagtcccccaatggggagtctgtgtggggtgtctaatgagggctccaatcttgcagcaaggctcgcttcttacattctgtgtatctgcaggcttaacaccatgtggaaactgccaaagcttatgacttgcaccctctgaagcagtgacctgtgctgtacctgggcctctttgagccatagttggaaatggtgtggctgggaagcagggagtagtgttgtgaagctgttcagggcagtggggccatgggcctggcccatgaaaccattcttccctcctaggaagcctgcaatgggagggtatgctgcaaaggtctctgaaattacttcagggcctttcccccattgtcttggctgttagtgcttggctccttttcacttgtgaaaatttctgcagcctgcttgaattcctcccctgaaaatgggctcctcttttctaccacatggccagtgatacggtttggctctgtgtccccacctaaatctcatcttgaattgtactcccataatacccatatgttgtggacggaacccagtgggagatcatttgaatcatgggggcagtttcccccatactattctcatggtagtgaataagtctcatgagatctgatggttttatcaggggtttccgcttttgcatctttctcattttctcttgccactgccacgtaagaagtgcttttcgcctcctgccatgattctgaggcctccacagccatggggaactgtaagtccaattaaacctctttttcttcccagtctcaggtatgtctttatcagcagcatgaaaacagactaatagtgtaaattggtaccagtagagtgcggtgttgctgaaaacatacccaaaaatgtggaagtggctttggaactgggtaacaggcagagggtggaacagtttggagggctcagaagaagacagggaaatgtgggaaagtttaggacttcctggagacttgttgaatggctttgaccaaaagcctgaatgtgatatggacaataaggtccaggttgaggtggtctcagatggagatgaggaacttattgggaactgaagcagaggtaactcttgttatgttttaacaaagagactggcagcattttgctcctgcactagagatttgtggaagtttgaacttgagagagataatttagggtatctggcagaagaaatttctaagcaccaaagcattcaagaagtgacttgggtgctgttaaaggcattcagttttataagggaagcagagcataaaagttcagaaaatgtgcagcctgacaatgtgatagaaaagaaaaacccattttttgaggagaaattcaagagcagctacagaaatttgcataggtaatgaggagccgaatgttaatccccaagacaatggggaaaatgtctccagggcatgtcagaggtcttcacagcagtccctcccatcacaggccccgaggcctaggagaaaatggttttctgggcctggcccagggtccctgtgctgtgtgtaccctagggagttggtgccctgcatcccagttactccagccatggctaaaatgggccagggtagagctcaggctatggtttcagagagtgcaagccccaagccttggcagcatccacgtcgttttggacctccacagaagtcaataattggggtttgagaacctctacctagatttcagaagatgtatggaaactcctggatgcccaggcagaactatgccgcaggggtggggcactcatggagaacctctgctagggcagtgcggaagggaaatgtggggtcagagcccccatacagagtccccactggggcactgcctaggggagctgtgagaagaggcccacttgcttttgattttacaggctcataggcagaagagactagccttgtctcagatgagactttgaactgtggacttttgggttaatgcttaactgagttaaggctttgggggactgttggaaaggcatgattggctttgaaatgtgaggacatgagatttggagaggccaggggtggaatgatatggtttggctctgtgtccccacccaaatctcatcttgaattgcagctcccataattgccacattttgtggaagggacctggtggagataatttaaatcatcagggcggtttcccacatgctgttctcatggtagtgaataagtctcatgagatctgatagttttatcaggggttttcacttttgcatcttcctcattttgtctggtcactgccacgtaagaagtgccttttgcttcctgccgtgattctgaggcctccccagccatgttgaactgtaagtcgtattaaacctctttttcttcccagtcttgggtatgtctttatcagcagcgtgaaagtggactaatacagtgaggctgcaaattttctaaacttttatgctgtactttccctttaaatgtaagttccaaccttaggtaatttctttgcttatgcatatgagtatagcttgttagaagcagccagatgaaaccttgaatgctttgttgcttagaaatttcttcctccagataccctaaatcatcattctcaagttcaaagttccacctagggcaggggcacaatgcagctaagttatttgctaaggcataataaaagtgaccttcctccagttcccaataagttcatcatttatatctcagacctcctcacattggacttcactgtctacatcactattggcattttggtcataaccatttaaccagtctctagcaaattccaaactttccctcattttcccatcttctgagccctttaaagtcttccaacctctgcctgttacccagttccaaagtcacttccacattttcagatagttttatagcaatgccccagtcctcagtaccagttttctgtattagtatgttctcacattgctataaagatatacctaagactgggtaatttataaagagagaagtttaattggttcacaattctacaggctgtacaggaagcatgatgctggcctctacactgcttctgctgatacctcaagaaacacaatcatgacagaaggcaaagcaggtgcagccatggcttacatggcaggagcaggatggagggtaatgaggaggtgctccatacttttaagtgaccagatctcatgagaacctactcactaatttgagaacctactcactattatgagaacagcaccaaacagatggtgctaaaccatttatgagaaattcacccccatgatccaatcacctcccaccaggtcccacctctaatactggagattacaatttaatatgagattttatggggacacaggtccaaaccatatcagctataaacagcattagtgagatctgccatttccttggagggttagtttgcagatattaggggaggttgtggtggatttgtgctggggactgggacgttaagcatgtcactgtttaagccccagtcgtggcaacagtgggctgatcatgcctatctttattccctaggctgatatatgctggcagtggtattggtggttaccagtggaccaattcttgggcttctagttggcttgcttggatgccagtcatgggcacagtggactgagcaggtggacaagttcttggtcccctaagcaggcactgtggtatgggttatggtagtatcagtgacaggaaaattatctgcatcccaggtactgtatgttgatgtgggcagtggctatgatgggctgggtgagccagtcttcaggccctcaggtgccagttaaggtaatagcagccaggagtttagagtttagggccaacctcatgcctctgggaggtgcactcaagtgcccaatgtggtggattgggttgggtaatccacatgatcctgggctaagtcctggggtctgtgctgggcaggcttgtgctcagatctcccagtggtgacagtagtcactagctgtagtgggcaggggcagggcaattctcaggtccctggcagaatgcatgagtgaggggcagtagtagccacgctgaggccccagcattgcagaggttggcgttggccttggtagccacatcttgggctggggagtggggaatgcacatcattctcatggcccagtcctgttgcacttgccttcagccctggcagtggtagtccttgcctaggttgtacctcagcccccgctacaggagcccctactcagcttgtgactaagtttcagtggcaacttgcacccagtcacatcccattctcagtctcagtggcacttgtattctacccggcagctacagccaatgccttgcttgtttctcagccccacccgtgggagcttattcccaggtcatgtcctagtcccagcagcaacagcccaagtttccctaatgcctcagcctcagcacttctgggccccaggacagtgtgcaatctgctcaaggctaggattcaaactggcatcttgctgtagctgcttgggtctcagaaatgatgtgggacctagtgcaagctccctcctgggagcagttctatcacatggtctacgaacagctccatattttagtttcaggagttgggagcattgaggggctgtcccttgaccagggttgcatgattccatgatgcagatgagggctgctggaagtctctcactcacccttttcccatgtatggaaagtcactcctggctcccagctgatctcaaccaaacaggctgcctgtcttcttccttccttgcttttggtgtttcctgtcacttttctgttgaattctggtctttgctcttggattatatattcaaaatgtgattaaagtgccaagatgtatttatgaaatgacattaatttattaaaaaatgaaacaaaatctaacagttttatttggcaaaaaggcaaatctacaattatagttgtacattttaatagttttctcagcaattgacagaacaagtagaaaaaaagtcaataaaagtaccaaaaaaaacccccaaaacccaatatcatccaccactttaatagacgtgaatagaatgctatcccaagcaacagagtatactttccttttgaatgcacatggaatgtttacagaggtatactatatgctgggccataatgggagactcaataagtttcaaaactgaaaatatcacagcatatattgtctaactacaaatatatggaactaaatatttggcccacatatttagagttaaatattttgtacaaatatttagaattaaaacaccctttatataactatagctaaaagaaaagttacaggggaattaaattattctttaactgaagaacagtaaaatacaatgtatcaaaatttgtaaagctgctgagaggcaaattcatagctttcaatctttatgtaagaaaagatagaaaagttaaaattaatcattttagtcctgacataaagttaaatgaaaacaagaaaaacaaatcaaaattaaagtggaaggttaagaaacactacagtagaatcaatgacattgaaattggacaaacaataaagaaaattaacaaggccaaatattggtgcttcattaagaatgaaattagcaatctctaaaaacttcatcaaggacaaaagtgacagaaaacacaaattgccaatactagaaatagtggatgtagctgcagatcctatattctttaaaaggatacaaagataaatattatataactattataccagtaaatttggtaaataatataaattgataaatatcttgaaactcaatttaccaaattgacagaaaagaagtagaaaatctgaatatataaaattacatacaaatatttaatataaattaatttataaatgtaatttatatttatatttttaaaaaattatattttttttatcttttttttatatttttaaaaaagattcggaactaaatatttggcccacatatttggaattaaatatttggcccaaatatttgacaaaactttttgacaagtgaaataccaagctcagatagtttcactattaaaatctgtaaaacatttctttttaaaataccaattatacataaaccttttcagaattaagagaataaagttacagttccaaatcattttatgaagactgtgttaccctgattgaaaacatgacaaagaccttacaaaaaatgaaaattatgttccagtgtttcttatgacatagacttaacactcttttgcaaaataattccaaatcgagtccagcaatatataaaatagatagtacattattaccaggtgaggtttatcccaggaattcaagtttggtttaacataagaaaaatcaatcaacgtaatacaacatcttaacagaataataacacagtagtttcagcaagtacagaaaagccactagacaaaatttaacccattgctgataaaatttatagcatgctaggaatagaagagacattgtttttctgataaaaactttaaaagttctacaggtaacatcataattaatggtaaattattgaatgctttccttctaagactgggaacaatgcaaggatgtccattcttactacctatttaacgtggtattaggtgccttagctagtgaatagatggagaggaagggcacaaggattggaaagaaataggaaaaaattgtcttttttcacatatataatatcaacttttttacataaaaattgctgagatctacaaccactagatttatgaaacaaatttagcaaaaacaaagcttacaaatcaatgtacaaaattaaattgtgtctgtctactagcaaaaagaaagaaagaaaaatgtatttaccgtagcatcaggaaacatgaaataatgagaattttaaaaatatgcaagccctctatactgaaatcttcaaagtattgatgtaagtaaaaaagacctaaaataatgggagaaagataccatgtttatagattggaaggctcagtttaattgtggttaattctaccaaattgatcgatccatggattcaatacaattctgattaaaatcacaatgggattgttagtaaaaactgaaaagttatttctaataaggtaatgtaaattacctagaacaaaaacaaattaattttgagagagaagaccaaaatctgggcaagcatacctgatgtcagaacttaccttaaactcttatcaagtcagggtgatattaatgtaataataataaatgaactgtattgtagagtttagaaatatccatacatacatggttaattttttttcccacaaatgtgacaaaaaattcaatggaaaaaagaaagtctttttgacaaatggttttgaaataactagctaaatatatgggaaaaaattatgaaaattatctcctacttacgctacataaaactatttgaggtggatcatagacataaaagtagaagcttttgtaatcttatacgtaactttcattaaaaaacatagaatgtcattatgaactttggatggatagtgatttcctggaaatgaccccaaaagcactacacatgaacaaaaaaaggatacaatggactttatcaaaaataaaacattttctgttaatctataaacactatcagcaaactgaaaaagcaagtggctatattcccaatacgtgtatctgaaaaaggatctgtatccagactatataaaaaactcctaaaaatcacaaataaaaagacaaaacacctaataaaagtgggcagtagacttctacagggagttagtttattaaagagaacataaaagaggcaatgaacacacgaaactgagcaatattattattcaacagggaaatataaatttaaaacacattactatagcatcactcatccaatatattgtctcaaatgaaaaagactgtcaatatcttgtttctgagaatgtgacataatgagaactctcttaactgctggtggaaatgcaaaattatattattactttggaaaacagttgcacagtttcttataatgttaaacctcccatgatttaacagttacattctagatatttaccaagagacaagaaaacatatgtctacaaaaagatcttagaagaatgtttgtggtagtttcatgtctaataactaagaactgacaaaaccatgaatgtccatccatagtacaatggataaatcacttgtggtatatttgtaacatgaaatgctaatcagcaacaaaaccaatgtgttattgataagtacaacacgtatgaaactcagaaactttaatttagtagaagaatacagacacaaaataatacatattagtctatttttatagatatcaaggacaggcaaaactgatttataatgataaaaattgaagaatcgtcacccataatagatgagatttgactgaaagtaggcataagagacattctggtgggctagaaatattctttatttttaataagttggagattatatatcttatatgattcataaatttatcatgatctgtgcatttcattgtatataaattttaccccccacctccaaaaatgtgatggttggagagtcagaaatctggatttaaattcagtttctccattcactagctttaggcaagttatacaactttacaaaattgcagtttcatcatatgtattgtggggtaataataatccttacttcagagccatgatgagaatcaagtaagataatatatgcagaatatttactagacagctaagtgcctagtaaagatgttattataaaatgagaacatggttttttaaagttattaatataaataaataatatgaggccaaatgtcattaatgaataattaataatgttaccatttaaatgattctttataatgtacaaattgagtatttaaagataacataatgtctcgttaaaaggatacatcgacactttgggaggccaaggcgggtggatcacctgtggtcaggagttcaagaccagcctggctaacgtggtgaaacccagtctctataaaaataaaaaaaattagctgggtgtggtggtgcgtgcctgtagtcccagctactcaggaagctgagacaggagaatctcttgaactcgggagtggaggttgcagtgagctgagattgcgccactgcactccagcctgggtagctgagtgagactccatctcaaaaaaaaaaaaaaaaaaaaaaaaaaggggaaggatacatcgaaatcataatttagaagggaagcaacctataattaaaaatccaaccatctgacaaaggtctaatatccagaatttgcaaggaacttaaacttatttataagaaaaaaacaaccccatcacaaagcgggcaaaggatatgaagagacacttctcaaaagaagacatttatgcagccaagaagcatatgaaaaaaaaactcaacatcactgatcatcagagaaatgcaaatcaaaaccacaatgaggtaccatctcacaccagtcagaagggtgattattaaaaagtcaggaaaaaatagatgctggcaaggctgtggagaaatataaatgtttttacactgttggtggggatgtaaattagttcagttattgtggaagacagtgtggcgattcctcaaggatctagaactagaactaccatttgacccagagatctcattactgggtatatacccaaaggaatacaaatcatgctactataaagacaaatgcacgcgtatgtttattgcagcactatttccaatagcaaagacttggaaccaacccaaatgcccatcaatgatagattggataaagaaaaggtggtacatatatcccatatcccatggaatactctgcagccataaaaaggaatgagataatgtcctttgcagggacatggatgaagctggaagctatcatccttagcaaactaacacaggaacagaaaaccaaacaccacatgttctcacccagaagtgggagttgaacaatgagaacacatggacacagagaggggaacaacacacaccaggacccattagggggtgggaggcgaggggagggaacttagaggatgggtcaataggtgcagcaaaccaccatggcacacgtatactgtataactaacctgcacattctgcacatgtatcccattttgttttggaagaaatttttaaaaagaagaagaaaaacgtctttttattgtaaaataaacagaaacctattacccaaagttttgaaatgagaaacagaaaacaaattattcataatcccacaatctatcaaaaccacttctttaatattacaaataatcttaatatctaacacaaccaattagtttaagtcaatgaacatgcatacattggtatctgtcattttcatttatttggtagtttttattatagctcgttgtttactttcttgtcttttttcttttcttttgtaaaacagtcttcctttaaaatattatgtacatattttgcattttttagttaactaggttaaatactatatttttgtctaaaaccctccttaaataatgaactataaaaattctattaaatgatataagatgattaacaaagcatgttttcattttatgttgatcacagtagataataaattattagaatttgtagtagagttaaagcatagcattttcaatatatattactactagtcttcttgttatctggaggtcttactaaatatgacataattgtgacaacattaaatcttattgatgcctttaccaaaattctttataatgttgattaagtaaataaatctttagtctttactatgtgcaagacattatgaattcagtggagatatgaatggagaagaaatgagcttgtggatgtaagatatatttgtggcagtttcaaatcaatagatctgagattgtaagttgtttacaagcccaaattcagatgacatatatattttgatcactggcactgtgttttaccaaaatacaaactgtttaccatcgcttaaaattgggagctctcatataaaatttcagacttctggcctcatctttcatacataagatctgacagtttcagattggaattgctcacttccaccaggcaacaattaactgggacagagtagcaggtgttccatttagagggcatacctcaagttttccagagacaccacctggccagcctcattcaagttacctgcttagggtttaacaaaccctcctcacaaggaaaaggaaataaatagcaaagcaaggagagaaactacatttggcactctgctttcatttcataggcactaaatatttgagaaagggagaaaaacaagtaggaaaaaacaatacaataaaagagatgagaagtttgacataaagaactcttgcttccaactttcccacttcaacagctattcagtaatacccacccccaagtccgcttgttttttcaatgttgtgcctgggtaggtgttgagttattacattagcctactaccttgctcatttaatacatctctactcccaactgttgcccttttgaagtacctcttgtgaatgtcttggagtaagtgcttatatgaatgttgttttctcgattcaaaaacagtttgacatattattaaaatgcaaatctttgtttgatttttacacaggctgaagagatcactttaacaattggccaagcatttgacctggcatacaggaaatttctagaatcaggaggaaaagatgttgaaacaagaaaacagatcgcagggttacaaaaaagagtgagtaaactaagcttgttgttttacatttgtgtgatgtaagtacagggaaacttgcatatcgtcaaacaaatttagaagccctgccattaaatttcacccacactgactgattggaactgctttcaccgtgttcccataatttttcgttcctgatcccctgcacagttttttttttttaactattttatattgaattcccacaagaacttagtgttctcatgtgactttgcttcacttcctgatgcttctcatggggatcagagcagcagaagcagcagatgctgggtaagtggttttccatgcagatcagattccttggtaattaaattatgcctttctccactcttcaaaatcatcataagcaagtttcactgtcttgtggttatattccaagattatgggtatagattgcacagtccaacaagaaaacacaatgttgagatattaggaacataaaatttgcacacacataaaaatatattataaatttaagtctttcaatgatctagaatcctccagcatttcccaagctttatcaaacaattttctccccacgcacaacaaagtacattaaagttttacgtaatataaattcctactcataactgtagccaatattttccaagaaaaaaaaaacagaaagttattcaataatgattttctttttagatccaagacttagaaacagaaaatatggaacttaaaaataaagtacaagatttggaaaaccaactgagaataactcaagtatcagcacctccagtgagtatattgaatatccttagaaacaagattttatggtgataaaacatctgtgtatcactagttctgcaatatttcatataatacttggggatcagtaatttcaaagtaaacatggatagagatgaaggctgctaagcagtttaatttaaaacttaaaattacctagtcagttcaaatcagagttgttttctatgttgctgttttcctctgggttttctaacataattcaaccctcaggttagtcttaagttttattacataatataatttttctctttgtggcatattcttcttttgtttctattaattactatttgctgggttagatttaatgacctatgccagtctccccttgaagtgctcaacttcattgtaggaattcaactgtgagcaagactgaacctggtttcttatattacatggtaagggttcccgctgggagtgaggcaattgtatttcaaacattaaaatgagtggtattctctgcagacaaaactcaagtctttgtagttaaaatatttatgtctgacttgtcacagttttgaaatccttttcccaataccatgtatgatatcattattacatgattttggcaaagggaatttattggagggaggtggaatttaaaacaatattttttctaggcaaaatatattcaggaaaagatatttttctgtttgaatcatctgtactactgatattctttattaaagtgtatttattattcttcatttaaaaatatttaatatctatgccaagcacagtggcttatatctgtaatcccaacattttgggaggccaaggcaggcagatcatttgagcccaggggttcaagaccagtctggcaacatggtgaaaccttgtctctacaaaaaatacaaaaaattatccaggcatattggcacacacctgtagtctcagccactgaggaggctgaggtaagaggatggcatgagcccagaggtcatggctgcagtgatccatgatagcaccactccactgcagcctgggtgacagagaaagactctgtttcaaaaaaaattaatatctaacttataacataaacatgaactgaaaaaagaaatttgttgcaaaattttttatggaagcttattgtgcttcaatacgtaggataaactcaatgaaaatgttcatttcttaatatctaatactagaatcattcacaagctcatcactatgaaaaaggatgtttctatagaagtttcatttagggtttcaaacttggcacactctggaaatgggtcaaaaaatgatttttcctgtaaactcacatttttccacctcccatttgaaagagtgagtatttccattgcttggcagatggtttgtgccagtagggctcctatggccttgatgagagaggttgggactgaggtaccaatgtatctatgctggagcatcctcttcaggttctggttttattctgatattccttcttattttttcttgtcactgtctgctgctcaccaggattatgatttttttcttgcctctctcgctgctagggacagaacatcagttcaaactcattattcaaccttccatcccaagatggaacacacatcctcttgggttttgttgaaattcatattgtaagccatgttgcgaaatatgctaggagaataagaataaatgtacttcatttatgtgaagggaagtaactttttcaaggagttttgataacgtagttgtttctggaattcatcacatatgaagagtagctttgctttcatttttgtgttgacaaaggagtaaaataagctccatcaccttcttggatgcaaatccaaacctggtcattgtgtaacctctttatctgaggaagaacatttgagaggagcaaagaggtttcaaacatattaataaaactgcagcctaccttttttatcttcccaaagcagacactgctctgagaagaaggtgggtcaggattattaatgtgcattggtgatctcatagggttactgagtcagcttcagaaatgacaaaggacaggaggaatgacaagatgacccttgcttcagtgtctttgaccatttggctgaaatagccatttcaagtggaaagcatgcaagttggtatataaatgaaacatagcctattcataagtataattcatttatttagcaattctcattagtagagccagttatatataaagagtaaaaataatgaaatagctatgttttaaaatgaattagcactcctgaggttacatcatttaacaattattttaggcattgtgttcatctcagcctggatttatctaaataaaatgcttcaaaaactacaactaagaggttgaatttaaaaacaaatcactttctttaaatcacggtcttacactgagttcatatatatgtagaaaatttattgtatccttgatcattatggaaataacaaattataactttgcaatctacttatagtcttttgtcatgtaatgttgttgtctacactttttctttaactttaaaaattatttgtcacatggctttttagctcttaaaatcttatcatatgattttttaaattgttgatatgctggaagatatacatcttcattaagatagaatctggaggacattatactaagtgaaataagccatgcacagaaagacaaatatcacgtgatgtcactcatatgtggaatccaagaaagtcaaactcatagaagcagagagtagactagtggttgctgggggctggggcagagttgtggagaaagggtctagaagatgatcaaaggatgcaacattttaattaggagaaataagttcaagagatctcttgtacaacatggtgattatagttaataacaaggtattatatacttgaaaattgccaagagtagttttaattgttctcacaacaaatatgtgaaaatagaatttatttgatttttagaagaaagtgaactcaagagcattttaaaattgctaaaatttaaatgtaaaattaaatgctaaaatgtaaaatgtaaattaatgagatatctaaccaattcaaatggtttaaaaaacattgttacagcatttgctaatgtgtttcctattaaaaaacatttttgcctttcatttcaaattttagtaatgtagctatgaaataaactcgtagaacacttaagtacagcttatttatctcatatctattcaaatgagctcccaaattcctgatattaaaataaaacaaaaatagttacctgcaattatttttgaagatttattaatgattcagattattgaatttgaaaaacagacaatgcaaattgcaaataataaaatgtgaatttaaaatatttaatagcttaccatgtgtctgcaataaagcaaatttctgttaagttagaaatgttttacatctgttctttcttatgaaatttgaacatcagttttacaggacacacagcaggaacacaaagtacctcacagagtgcccccatggctagcaaagtaaatgtttaatgagtttataaccctggaaataggactctgtgggttttatgtgtttgttttgagctcagaggactgaggattagagtgctccaaaatgagtaagttctcatcagtttattcaaaggattagaggcagtgatctacacattcattaaagaagcattgaagtaaattatgaatcccgtgatgcatattgaattacaacataggtgggtatggtgtatgcaattaatttagcatctgatgagtttttagtggtgagaggagcccctaacacagaaaactcttcacaactgaccagcccaagacaggtcttgatcccattggaagccaaatttttcaagtcacagaaaggtgacacttttgtcaaaaatctctaattgaggtgtagttctttataaatgatttaatgctataatttggttcacaaatatatacttataagcacaataatgttctaaaatatctggatatgctggtctaacacaatatagttcacactaagcaattgctagtcaaataaaagacatatttaatcttagctttagtatagtctctttggggaaagggaaagaaaaaaagtaggaatggaattttgggagttgtggaattaaaagtaaagtgaaaataaaaataatgtaaatcactattatagatattattttattttcagtttatgatgaagtagaagatgaagccagatgtggcaagcaacagaaacattcttgataaaatttgattaggctgggcatggtggctcatgcctatagtcatagcactttgggaggcagaggtaggctgatagcttgagtccaggagttggagaccagcctaggcaacatggcaaagccccatttctaccaaaaatacaaaaattagctgggcatgatggtgcatgcctgtagtctcagctacttgggaggttgaggtggaaagattgcttgagccggggaggtggaggctatggtaagcctgggaggtcaaggttgcaatgagccgtgatcatgccactatattccagcctgggtcacagagtaagaccctgtctcaaaaacaaacaaacaaacaacaacaacaacaaaacttggctagataactaaaaaatgacaagccatcttctctaacaagaggtccaaagttaaagttgaatttccgtaatacaagacaatgattcaaatctaccaaatcgtctaataatatattacagtcttattgatgttgatatccttattctatgttaaatcataaatttaaaatgtgaggcccaatgcagtagaatgatctacatggacacctttgtattttaaagagtctctgtttaggtgagaacatacgtgcatgtttctactttcctcagagacactctaagggaaggttgctatttcttagaaagtttgtcagtcacttatatgttatatacatgaacatgaattggtcatactgatggattttgaattgcaaactaaataattttaggttgaagccttgaataaaaatattcaagacttctaaaaagttccctcaaggttttatggtgtacattttagttttggttttggtcttcctagtcccactgcttcatcactgggattttgaaattgttcttagtagtagaccgtatgttacaatgcatatcactttaattttcattttgtctcacttgtctattgtatacatttgatatagttgtgatctgctatggaatattataaaatgtgtactgaagatctaatatttccatacgtctaggctctttggtttttacagtttatgtatttcagatgttaaagggtttacatccatgggggaaagaaagagaggttggtaataaacacgtaaatatttcaataaatacatgtaaaaatgtagatcttatatatgctatgaataaaacaaaatagagcagaatagaagagaatgattgagaattttgtttagagaaagtgaccagggaagcaagctccttctaaggaggtagcacttgaattgcaatctgaatgataaaatgttagcaaatgcaacaggctgaaaacaataacaagaactttgcagctgcagtgtagtgactgaaagccaaaataattggaaaagacattgaagagaaactcagagtctagatttgataagccttcacaggcaatggcaaaggattggtatttttttttaatgcaatgatatgtcacttgaaggttttaaatgggatttgtggatcatctggctgctatatgcagcatggactctaaagaggccaaagtgatatcccagaaggagacatttcagtagtctaggagaagggtaaattggcctataattctacctgtggaggttatgagcagagcttgatttttgacacattttgaaagtagagcttgcaaaatttactaatggattggttgggggcagtacacacacacacacacaaaaggagcaggaatgtcccttcaggttttctccttaacatgtgggaagtgatgccattttctgaaatagacatgacttaggagtagtgagtggtaaagaatcaatatttcacttttgcctacgttatttctgccaactagacagccaattggagatgcttattcgatggctgaatatacaaatctggaattcatagagaaggtctggtctcatgatgtgtgcttgagtgaaaaaaaaaagcttgtccttttttattgtcattgtttattgtttagttaatatgcccaatataactttggtcactgtgagcttatgtaattgagttctagctaaagaaaataatatgagactacttttttgttcagtattaaaattaagacatccctaacaataaaaagtatacctttaatatttgcttccgacccttttcacttaaaaccaattcaccaattcttcatatgcatgataaatggagaccactcctatttctcactttctcatataaaaattgatatgaatatataacacttcatgtatataaaatattttcttacttgtttttaaacagaatacttacatatcttctaaataccacacagttgggtcaatcatgggttccttttctatcaagtgaaatagccttcaattgtacctatattacatacctctgcatcacactgaaattgtggaaatcttttcaatggttttagaaattggatccttattttatacagtcacttagatacactgagaaatttccgttacttgactgtgctgtttgctttttgctgtgtttcagtggtttggcaatagattagaggttgggttttccaccatttggtactaattttctgggaacaatctgatttccatttattacattcatatggcaatgctgcctgtatttatattagaaaaagagtttattctgccctcatagcctcatagcctcatgaatgcctgcagaagattgtttcattataagatgtgggcataacaagttaaatcaaaatgttcctcttgattcttgtatctgggtactttcattttactcttctgactatagaaggttttaaccaaaccagactattgccaggaagttaagtgagtaaaattgtagtcctagggaatactggattctattgctgagtaaaacaaatgtcttcctttcaattaaacccagtgttagataaaattatttctttacataatcaactgtgtggccactgattagacttgataggacaattataacctaaaacgtatatttcattgtggataaacaatgtatctatttattttcctctagtgttttttctgctactattgaagtgagaatgggcaagagcagattgtgaaaggtcttaattacacaacaagctgaatgtgaatctttaaacaaaggcataaattttaaacatgaattggttcaagaatatttgatgcccacaaaaaatgattaccattctgcaacttcactttcataattgttagttgcacaagataattctaaaagcataaaccctgtctaacgggaagaaaaatatgttcccattccagttctgatcataagtacctggtcaagtcatttagcctctccttctttcagttttccactttgtggtacaattatatccatttaacttgaaagattcttgtgaaaactgtaagatagtaggtcttacaactaagagatcagtataaaccaactgcagacctagaaatctgaaaaaacacagatcttctgctgtaagttctaaattagagaagtcattacctttaaactttatttaaaaagtgatattgaagatacattataacaatgaactttaaaagtatgaatcagcatggtaatctagaaagatctgctagaacattttatgctaccattttctttctccatctttaatgttatttataatttttcgggttttttaactagaaaaaattgatttaatatataaatgtaagggaatttatttcttaattatttcttaatttaattataaatagaattttgaaccctgccattttagtaattgtgataaattatattttaatcttgacatttttgttttatgtttaaaaagtctttggatatttttattgccagtgcaattaacagcaaaacataaaatttcattataatgctaatatttctgtagatattatgacagaattgcttaatcttaaaagcagtgtttctgttattattgtttaaatgtatttaatatttgtggatagaattcaaacacttttatatttctttttgttgtcacatttatataaaactcaaggttgaaatattcaccattgcctaaatgcaccaagacactacttactgaaaaaaaagagctacaaaggggagggagagcattaggacaaatacctgatgcatatagggcttaaaacctagatgacaggttgataggtgcagcaaactaccatgacacatatatacctaggtaacagaccttcatgttctgctcatgtatcgcagaacttaaagtaaaataaaaaaaaaaaagaataaaaagagctacaaaaatgtagcaacaacaaatctcaaacatggacactcattattaatatatctgaataacctaacaacttctgtataattaccatataatttttgagcacagaattcccctaagtataataattcagatactgtgcatgttcctaaagaccaaaacacctggaactacgaacataaagcagttgcttgaacagtggtgccatgtacttctgtaggacaatccaaaaaatttggttcctagccatctgtcagaacactgacagaaagaccaaaataaaattcctcaaactgattttcttctcaacaatgtatttaattactttaacacataaacatcctcaaccagttaaaaatagcagccaaaaaaaagactggttccagaaccttgaaacctaagtgcgaaattgtcactgtttgccatttaggtgctacatccgcacgttcatatccttattgaataggcctaaccatttagtacagaatcaagcaccaaatttatccatatatttaaatgtgctggacttagatttcatttttatagggaattacatataacatctgattccttgacttgaattgcttctaggttaggaatcaaaaactcaaactttaatatagcccagattatgacattcaagtgtgaaatgggcatatggtaggagtgataaatttgaaagcacaggctaccttcaaagacacagcagatattcaataccactcaactattttcatgcaagtatgtgggcccactttctagatttcctaacttctggagaaaagttctggattttaatatgtaatctatttttatatattaatttatttttaatttaaaaatttctattgatacatattagttgtacatgtttgtgggtagagatgatattttgatacctgcacacagtgtgtaatgatcgagtcagggtaattgcaatatccatcacctcaaacatttatcttttctttgtgttgggaacagctagttctatactttaaaagacccatgtgatctaaacaaaaactgccaaattgctgatgatccaaagaagacctgtgaggactagttctggagtattaaactctagtaccaaaacagttgacattattaaatatccctgatttaccattctgaaattgaaaaaacctcttaattgtagtatataaatacttgattatttttatattatatacattctccatttctgtaagtttacctccccagaggaagtagtactatgagaatactgcagacaccatgataaaaataacagagcactttcaagtaaggttattttgaccttcagttggttttcaggtacctagtaaagaattttggccaacatatatcctaaaaaatatagagtattaccatgtatattttaaactagataatatcaaggacaacttccacttaatatcttatctttactcagtacagacagccttatcaattaacagtttaagtaaaaagatgctctggtataaattagacaataaatatcatttacactaatgtgttacatagagtatttgggaacgaaaaacaaaaattttctcacaaagagcttacaattgtaatctgtaattaaaaggtggctaccaaggacagaattttacagtaagttatatcgaacaaaaacagattttaaaaattgtgtacatacacatctctacataaatagatggaggtgtattacaatggagatcaaggccgggcgcggtggctcacgcctgtaatcccagcactttgggaggccgaggcgggcggatcacgaggtcaggagatcgagaccatcccggctaaaacggtgaaaccccgtctctactaaaaatacaaaaaattagccgggcgtagtggcgggcgcctgtagtcccagctacttgggaggctgaggcaggagaatggcgtgaacccgggaggcggagcttgcagtgagccgagatcccgccactgcactccagcctgggcgacagagcgagactccgtctcaaaaaaaaaaaaaaaatggagatcaacagagaaataaaaaattatgtatttatatatgcatattaatagagtgattaattatataactcagactagcagaggttctgcttccacactgaacccttccctcaatttaatctctcactttacatggcttcctttttctctctgcttccagaaatatgtgaaggggggcctcctagcttaaggacatacctcagacttgttggtccttaaaattctaattttagttactaccttttacaataaagtttatcaaaaatcagattatttttggctgcctgaatttttgttagtggtgaaagatctctgacatgtgatttgcggctgaggaatgtggctcccggccagaatcttatgtgcgatctttctggcccgagcgtaggcagttacaaaggctttgcctggcacacctcatcacattgtatttggtgggagaaaggtgccctcatcacattgtatttggtgcacagtttggaggaattgaatctagtactcaggtgccctggccagccatgctcttgtgcatatctgcatttatagcccaggcaactccactcaggggcctccttttagggggccttaggtgcctctcctgagaccaccttattcgagggtcttggagaccacttttctccagtatgactcagtattcagtacttttctactgctagcccttcccttctccctcctaccgtctcttgtccgaaaaaaaccctcaggaaccttttgttcaggagtccctaagtaatgagacaaagcctcacttctgcagtgatacatctgacccttgctcaagtgccattccttggggaaaatggagcattgatggagcaggcaccttctctctggcctcttgcttatactatagcagtaaatgaataaagacttaattattacttccattttggctgctgtttaattggccactgtgacatctggcagctcagctctctccagctcagctcttaacagtagctttccatgttgtaatggaaatagcccctaaaagtcatgcacatactgatgttcagacctagtacactgcttgcttgttattcattatctctctgatttatttgagatccttgtcaatcacctcttcccatcacccaaaaagtcttacaatttggagctcctcatgactatagaaagggcatgatgactagagtcagactgttttgaattttgaatctgctttctacctcatacaagtcacaaagaatctgtggaccttaattcccatgtatttattgtaataaggacataatatcactactactgatacttcaaataatgttttgaggattaaatataaaatgtatgttgtaatcccttttgaaaattctacacaaccataactttatgtacaagagtttactcctagttctgtaactgttctctcattactatccttcctttttccatttcattacagaagccctctccaaaataaatcttcaggctttcttcatgtttctctccattaccttcctcttaggtcccgatgaatgcaatattctatttaaaataccaaaaaatgtaatatttcagtaaaaaaaagatcaaattaagcaatccagaatctaaggactatcacataggaaaatcaactctaactctatgttttaattttagaaaagttactgtgaaatgatcttatcatcttaacaaaacaccattttacaaataaatttcaagtatactttctcctttcctccatgcctgccctcttaggatatttctttttctgtcattcctttacagctgctgcacaatatgtctgatcatgaacaacatgtgtttcagagatgctcatcctctttctggcgtagtaatggtgattcatctccctgtctcaatatttcttccatctctgtcactcctatcaactcgcctgattccagactatcactgggactgttaataccaccaccttctaaatgtggctttcccaagccagtcagtgagagcagcatcccaagacctcatgtaatttgctaagcagataattcttttttattatcccacttattttgcttaaattctgccaaaatgtgctatttgtaaagttatcaaaaatttagatgtatcttgagtcaatgtgatgtgatctggagcctttgtgtgccattgttgttttctttgattacctgataccagaaagtttcaagtagagggtggtgacagtgtagaaatttacatacagatacttcaaaggatctatcagatgttgcagttgggaaattagatcattggtaagagcaatttcagcagagttcagtgcaaaaagaacaaatctagattgataagagttaaagatagaatgaagtaaatcttaggacagaaagtgtagtatctctttcaaggagcttagccttgaaggaaaaagaaaaacagaatagaggctggaagattaaagagggacagagtaaataaatttttgattgatttgttttgcttttaatgacagccaagattttagaatttttgtatcgtgaaaaagagtagagatatagaagtgagaggggatacaggaatgggataattaggggaatggtattgctgagtaacagtaaaggggtgaggggatacaataaacaaattgttaaagaaagggggatgacagcaattttcctgcatgaaaaataatgtactagcaattattttagctgaatagcaaacccatcattctctacacacaataagcctgattttttcatcacctgcactacctgtgaatcagaaaattaaacgtattctgagaattctaattttaatatgaactactggaagcaatctctgtccaagttctcacaggaaaagcaaatttttcgccactattcccccaaaatggaaattctcttttatccctgatcaaatcagatggttttcaaaggagattatacatatatacatattgttccctgttttacaaagtgataaatgtctaattttgatattacttcttggctacattttcatgagattttcatttatctttccctatatgtgttcagtcctggcccagactgtatcagaaaactcaatgatttgggcagtacactggcgattattaatttagtttataagattgctatttattacagaaaacttgatgaaatctttcaggagtaaaatgtactgcaatgaatatcagttggttcccattgttgatataaatacaaactaaaatatactctacttttgagaatgcaaaaaaaatcaattgcatttgaatgtttatatttaagaaggcaggtcacttatgtctaattattccagtttaaaatgtaatcttatgcagcgtatcttactgaaatcatatttttacatgaatagtttctaatatatctaattctctgttacaagtagcagtcatttctatatatcccaaaaattcactgtatcttttatattcatctggaataatattgtcaccgtttttgccatcatctttgagagcatttttacagaaattttctattgctttcttctaaatgagcatttatcataattagtggaaccatatgaaattgcgaatacttaactatttttggtctacaaaatggcaaattcttatgatgcaactgaaattgttgtttacatatattttatatgcatatgaaatatttagcattacaatgtgtctatatgaaatattaccctaattcatttattttcattgcaggcaggcagtatgacacctaagtcgccctccactgacatctttgatatgattccattttctccaatatcacaccagtcttcgatgcctactcgcaatggcacacagccacctccagtacctagtagatctactgagattagtaagctttctcaacaaatcaaagtttcttgttatagttgcatacattttaaatatataattaagactttgtgggaaattacatatcttaacaaccttacttacaattttaattattaaagtattatttttatatttgtataaatttccattaattctattttactttataattcagactacactactaatgacatctctgcttgcaacttttacctattgtgtgaacaattatgttttggtgtattacttcatatttaattatatatcactgttttgggttatatttttaatattttactttaacttttaaaaataactggtggtaattaaattgatcattttttacatgtttaatagagctggttaaaatatttttgttatcatagggtttatggacttttttgttaaaaaatatataaattatatcatgatttcttaaccttttgtaagggttctttcctatctaaaatgctataaattcattgcttttctgttttatcttttatatatctggaaggaatattaaagtctctttttgatgaattagaaaacacctataagcctgtaaaataaaaagcaagttagttacttgtaaaatacaatgagcatacaggcattgggtgaacgtttccattccaaattggagaaattggcaaagcgaaggagccacaggccccttgcaagtttgaaacccggtggggcagtcattaaatcttaaagctccaaaattatctcattttactccatgtgtcacatccagggcatgctaatgcaagggatggaccccaaggccttgggcagctccacctctgtggctctgcagggtacagcccccatagctgttttcacaggctggcattgagtgacaggcacacagtgcaagctgttggtggatctaccattcgggggtctgaaagacagtggccctcttctcacagctccactaggcagtgccccagtggggactctgtgtgggggctttaaccctacatttctcctctgcattgccctagtagaggttctccatgagggctctgctcctgccacagacttctgcctgaacattcaggcgtttccatacatcctccgaaatctaggcagaggctcccaaagctcaactcttgtcttctgtgcacctgcaggcccaacaccacagggaagccaccaaggcttagggcttttaccccatgaagcaatggcttgagctgtatcttggccccttttagccatggctagagctggagtggctgggatgcaggacatcaagtcctgaggttgcacagagcagcagggccctgggcttggcccacgaaaccattttttcctcttaggcctctggacctttgatgggaggggctgccgcagatgtctgacatgtgctggtgacatcttccccattgtcttggctattaacattcagctcctttttacttatgcaaatttctgcaagaggcttgaatttctcctcagaaaatgggttttctttttctaccacatagtcgggctgcatattttccaaactttttgctctgcttcctttttaaacgtaagttctaatttcaaattatttctttgtgaatgcatatgactgtatgcttttagaaaaagccaggtcacatcttgaatgctttgctgcttagaaatttcttctgccagataccctaaatcatctctctcaagttcaaagttccacagatctctagggcaggggtaaaacactgctagtctctttgctgaagtgtaacaagagtgctccagtaacaccttgatagatttttcagtgtctaaatattcctgagtatcaaagtttgataaatatagacagagaaatagagattatatagacataatctatataagtgagtcactccaagtcacttcttgtcatttcgtttactaaatttttacttccttttacaacgggacatgtttgaagcagaaccttttcaccaaatcttccctttcattaattcattttttaacaaacacctactaggtgaaaaacattattcagtatgcttatggtgtagtggaaaccaggacatttctccagagaaaagatcctctgaaatctaaattttgattgattgcctgagcaacactaaactgaggaaaataaataacagcaatagtaatattcatcagttatatataaggtaacaataaattcccatttgattaggatagccctggcttatagatttttacccagtgtaactattggaaatgctccttttagttttaaaagcatctgtatttggatgataaattatatgttctccttatttatacaatacctgcaagtacaaggagcttgtaagaatttcacatttattaacttatttaatacaagaatctgggaaaaaacatgaaaactggaaaagtaagactccttcacaatgagaatcacagagtgattttagaggatatggcagaaatcaagtagcataaatattatttcttttttaattttttaattttttaatttttttattatactttaagttttagggtacatgtgcacattgtgcaggttagttacctatgtatttcttacatagaattgaatttagagaatgtaaagttctctgcaaaatgaaggtatgaatatgttataaatactaattttcatatatagtgtaatgtttttccaattaaggatacatttgaattgattcagaggaaagaaatttcttaagaattttttattttaaaaatcccataataggccgtaatctatcaattacaaacatcaattttaactttgatacttctttagtgataaaaaagtagtgcatactttagaacatatgtacagaaagcttttttgacattgcattcctgctgcttttaaaaaagaaatgtatttctgggataggaggcatttttaaagaaactatctcattgtgactatctagaaaggtgacatttcatactacatgagacaatgtgctttaaaattttctctgaataaaaggagagataagagtacatgaactttgagtagagctacttacaagtctacttagtcctacatattgctttactattgtgttgcaaggcatcaatcaatggaattagggtagtctcaatgagtagtgcattaattttagcaaatttaaattgcttcaataaaatataggtgttgtaacatacaattatcagctctttggtgaatttgacattaagaaatcttcactaaaacacagaaacctctctagataataattctttataataaaactttttaatatcataaaatggatcttttcttccttgttaatgtttaactggtctaaggtcaggaaagcccaacatacagtgtaagtgtgggttagtggcttatttgatcatgtaaatattcatttatataatcctgcctttgaaatctaactaactccagctcacttcttgttatttcatttactaaattatttccttccttgcagaacgggacctgtttggagcagaaccttttgacccatttaactgtggagcagcagatttccctccagatattcaatcaaaattagatgagatgcaggtgactattttgatagactggcccataaatgatttatttcattttgatatgggacaaagagaatgttatgtaccaaaactatggtttccttcaattattttcgctataaaaactcgcttaaaataattactttaaaataataatgtacagttagtcctaaaaatactcctacatatgctaaggataaggttgttggttttttaaatggttcaatttataatgtcaataagatggttcattttttaaatacaaaatggcatggattctaatggttcattgttctgaaatctagagttaaacagtcactgcattagatttataagatttgatctcagtcttaacaattatgaatttgaaaattgtaaatgggtagatgaaggaaaatctttgtaagagtgaaattattctctctgaaaagaagcattgtagctgtagttcataacttttgggcttttatttaaaaagcaaacaaccagtgacaacttatttaggaatgtagttcagttgggttttcatttctctctcttccttttacttttttgttctaaattggtctgaagtttacagaaattggttttaaatgctttgcactatgggccatgatttaaaaatagtcttataaaccctagaataaagtcttctctttatatttgccctttacattttggtgaagttattatatcctatttttcatcaaaaagtttatatatggtagaatccagacagacaccaattatatgaagctgattgagaagagacaatgaagacactaaagtaaggagaaggaggtatttttgtttattagtcttgggttaatacattaattctctatgcctcacttcctagaaaaaacaattatgggtgaacactgatctatcactgataattgcaatccttcttagaaagttaatttaaatgcccttttactcatttttgactgcagctgtgtagctatcttattttctaggtagtacatgaattcattattgttctagatgtaataacatgcctgaatttaaaagttgaattacttaacatatgtcttgaggttttcaaagaatctattaaaacagtgtttctcaagttgaatgattcttaatccccttttacataaaaattgttttagatccttagtattaacttacaatttttaaatattgacaaaaatgttataaacaacttgtccttatggtttttataaaattatgaattcaataaattataaattaaatgaaagccaaattgcaacaccaatacaggacggatgatcttatttggttaaagctaaaaccaccttatcaaatttctattgatttcaacatgtattctatctgatggcacagatttcctagttcttttctatatttcaaacgctatgaaactttcaaatggcgcatgataatttagcaagaatgctgtatttcatatgaaatcaattccttttcttttacattagttttacccattggacatgtactatctggtactaatgcttttgtagtaacaaagaaatatttatgtggtagtatttattctcaagggttgcacaggtcatacagagtacttctctaaaaattttttagattttcccaaaattggaaaaaaaattatggagttttaaggataagcctctatttccagattttgttgaaaccaagtgtgagacacaatgtattgggatgattgagtgatggtgacactcaatgttaaaccgtggtgtttttgcttttgctgtttctaatattttcttaatgtctttttaaattctttactgctttcatggtgggtagcgccagagatggttggtatattatttttataataattttaaacaacttacaaatttttaaagctgaaaccttaaaatttgcatgccttatttaataaaaattcaaacaacagcttcatatgggtatatctgataattagttatgtttagagaggttttataaaccacattttaagattatttttcagtgacttagtcactattgcattgttcacttcattgtttcctttcttttctttttttttttgaggcagagtctcactctatcgccctacccaagctggagtgcagtggcatgatcttggctcactgcaacctccaccgcccgggctcaagcaatcttccctcctcagcttcctgagtagctgagactacaagtgtgcactaccacgcgtggctaatttttgtattttttgttaaaaacagggtttcatcatgttgtccagactgggcttgaactgctgggctcaagcgatctacccacttagacctcccaaagtgcttggaccacaggcatgagccaccatacttggccatgattgtttcttttagtccaatatttacttgcaaggtcactttaacaaaagtaaaataatattttcttcatctaaagtctatgatggcttttattattaatcgtgctagcctaatgaatctaatgcagacatttagctatctttgcatatcatataaaaacttaatatagtacaatgggttgtgaacaccatattgagttaataagcctagtgagacatttagttttcatctttcatttacagagtattgtgactaagctatttttaagagaatcgaattattaagtttgaaatcacagaaacatctcatgcatgtaagcatttatgcagaaatgttagaccatatttcagtataagcagttagaaaattaaacatctatttgaaatcaataatgtagctatttgatttgacataatttaaactgtccagtacatgtcaccaacaggaaaataagtggaatagtattgatagcccacactgtaacatgtgagctataataatttaatacattaaaaaacaagcatggcaagttcatgaatgatgaaagaatcatgtatgagtggtgttaagtcagctagctagtactctgggagaagatcaatgtactgctgaaacttacagcaaatgccgagataaatttcagaagtaatcaacattttaaaatatttaaaatattattgaatattcatcagacttttgaattgaaaagaaaattttataaggaaaagaaaaatacggacatatagtatccaattttttaaaatttactgtctaaaaatatataaatacattacatatacataattaaagcaattagacaaatggctaggaaactaaagaatcaacagataaataaaaaagcactagttcacaaaagaagaccacaagtggcttacacatatgtagacatgttctgtctaatcaaagtaaacatataaatcaaataaagaactgtaatgctattttaatctagcagattattttttaaactaataatcaatcaatacaactgaaagtgtgataaaacaagcactgtaaattgttggcagtccagagttagttcagaggtaactatggcctagcagtctctttaaagggtagcttgttattaatacttttatttctgtttgatatcaaaactttaaagcaatctattctgatgaaaaaataagtatgaatgtgttcaatctctgcgaataaaaatacctagtcaacattattcataattttaaaatgctgaacgattttttttcaaatcaacgtaaaatgcatttttacgatggaaacaatcataaaaattaatagcattttatatagtcataataaattagttttgtgggaatttaaaataatcagggtctgcaaagatgaaaagaggaagatagaaaactatatgtaatatattacttacataagaaaattatatggcataaatatatattcatattatcattaaaatcatttttaaaaatgtatagatagaaaaaaagacatacctcaaaatgtagtgatttttctttccttgatatgcttttctatttcaaaataagaaaattcatcaaaatctttcgtataaaaagcatatggtgaataatactttaattatttaatcattcttttgtgtgacgttagcttatgataattcccatcactacataagtaaataaagtctcatttttattaagaagtttgaagctcaacaggtgtgggaaattttatctgaggaagaaagaaaatcaagaaaccttataatatgtaaggatccttaaaaagtcaatatggagatagatattattgtaagtcatatactaacactttattattaaaatagtgattgacctctgttttactttggctgctattctgcttttccaatattgataacacattgacaaatagtattttcagggtaattgaagtgatactggtttactagcagaatgaactgataaaatttaaaagtaccgtatggtatcaaacatttccacatgtaactctctttctatctgtcattatctatcaatgtatcatctatttaccatttgtaatataccagaagatgacataatatacagatcttcagatatccaaataaaataattttaaagaaaagtttacttacagtattttagtttaaagtatttatttttctaagtatttgctggctgtttgaaaaatataaataaatatggcaaaatgtattttgtgataagaatagatttttaaaaaataatgataagtagtctcatatttactcaactaaataaagattgtattccaagtactggaaagacattttgaaaaactttcacaatgattacatcactgtaattgctatatagtagtagtctctgtgctgtaaacataaagaatattctttgaacattaataacaaataaagtatggcttacagctttgtaactaccttcctcctctatatgatgatgtttacattggatttatagaaagataagaacatttacataattattctaaataaaagtaatttggagagatgcaaaaagatacccaattagctaacatacaagtagatatagtcagtccaattaaataaaacacccaaagcagaggtgaaaaccaatggttacctttaggagacattttgttttctttaggaatacactgctatctgcatattatttgccaataatgtgttgcatggccactccaaattacaaattacctttctgaaacatttcagttctgttagtaagaaaaaaaaggtagagtatgtagagagcactaccacatttgcttctacaaggagacctacaatgtaacctccactttcattgatcagtgcaagtctgtgcttttcatctttttgtaggccaatgtgtatagatttacaggaaagggtaggaatggggagaggtggcaagactggagatggcccacagttcaattatcttatgcaataaaaaaaaaagagattggagtgaaggaggacagactcctatgccattattttaattcaaaatcttggtggaaaaacactttcttagcaattgtgttcttatactcaataaatcatagacaacttaacttctaaaatatgcaaggaagagtaggagtcaaagaagccagtccgctacaagcaacagcaaggctagtaggggaagttttctccatggcaaagtaatctgcagttgtgtgttccacagaggatacggcattgcatttaaaagaagtattttacccgggctctggtcagtgctaaccaggaataaggtgaaaatcatcaggctatcttgaacctctcatcaatttgaagcctaactatcttaataatatttaaattaataataatttttaaagctaacagatttcatttacaatagaatgatgtagtaactagccttttctgaaaaagaaacctttatcttaattttatgttttctcttctgtctctcatgcatgctaacctcacatagatttaaaacattaaagtgttaatgggtctgaaagaactaccagtgctatacacctatataaaaattcagcaagtcaacatttgacatatagttatttattagttgatcaaagcatgaatatttcaactttagtgcatagtcttttttattcactgattttattttgctgtaagcatttcagatattaattattttattctgttttacaggaggggttcaaaatgggactaactcttgaaggcacagtattttgtctcgacccgttagacagtaggtgctgacatcaagaacaagaaatcctgattcatgttaaatgtgtttgtatacacatgtcatttattattattactttaagataggtattattcatgtgtcaatgtttttgaatattttaatattttgaaaattttctcagttaaatttcctcaccttcactattgatctgtaatttttattttaaaaacagcttactgtaaagtagatcatacttttatgttcctttctgtttctactgtagatgaatttgtaattgaaagacatattatacaaatacctgccttgtgtctgagttctatttagttagcatcttgaaatttgtattcattttccagatggctagtttattaatgatttcccaaaagccataccttaaagataactttttaaattctgaagagacatgccaatgtcaaactaaacatgttctgtttttaaaccaacaaacatgttactattcattggacagatatcattttatgtataaatactgttcacatcactgggaaaatgtaaactttaaacataatgccacaaggtcactaatttctagcaggtaaaattataaggatataaattccaataataaaccaaatgtatttagagtatttattagtaaatgcaaggtgatgttagttatgatcagttatactctaaatatttaatttgttttataaaggtagtgaaaaaatgaaaatttgctatttattaaaaaacattaaatttcattccaaatgagataagtgatattactataacatctaagcatcatctgatttgatattccctaaaaaacatttggaatatatgctatctatagattcagtatctactacccatatttactttaccaaatatatttctcctcactgcataaggactactcttctcatattttcttctttgatgaagatatttttcaccaaagtttattttgtgatgccctcttggttttgatactttaaaatctgtggcacccgttctacatgaattatcaatatttggtaaattcaatctgtatttgttttgttaaagtcaaaaatctcattttccaaaaaaaaaaaaaaaacccagttactgctcagtttagtcttgaacatgagcaataaaattctcttgcatttcattattgatgtgctgatgaacctggacttttaaaaatatttgtttcctatacctttaccctttacctaacagactaatttgtactcagtaaaacaaaaatttatggtcaaaatttctaacttggttcatcacattataagataaataaattaaattaatgaaaatgtgacttagagtaggggtagccctcaaaaatagatttatcatttactcattggaattttcttcaagtgttaaaggtacattttcactaggaaaagaaatcaaatatgcttatgcaatatatatttgtgtgtttttccttaatgttatatggtatatatgagccttcttgtttagtttcttttatctgctaagttgtaccttaattagagggcaatatatgtttcataaagaagagtctttataattttgtttgtcagatagtattttggaatttgtataataaggatgtttagaagccatataagtggctttttttaacagatagaatttgtatttttattgtactttaaaaagatttatgtaataggtatatatttagtggccatttattatcaatggtaacacaatggagtactaagatggtatttgcacatttaagatatgttactttaccaatttttaatggtaatcaactctgctactggcatgatgaaatagtacataactggtcattaattatgaacatttatttctccagtgcgtttttatgaagatctggttgaaaattgtatttctatgtaaactcaacgatatgtttggttttcctgaaaataaatgattttaaataaa

SEQ ID NO: 128 - DNA, 84826 bp, Homo sapiens
gaagcacatctggacagctgtgcggcctcctcgcgggccgacgtcagccgagcacgtcccccacgtcctctccttctcgccacttattatttattcgttttcccaaagaagcgactagggacccaagtttaaaaattcctccccccacccaatgcgagacgtggccagatcccatccaacacacggtttaattttcatggggctctgggatcaaaagaacagaaacagcaacaacaaaagcccagccgctgtctgattttaagctggcaaagtgggaaaaataaagtgttgagtaaacagaccaagttgggtaagttttggatacgtgctggatatcatatttctcttgccgtgatctctatcctgtgtctttttactgttctcaccagctttctcttcatcaaggggagaaaagtaacacttgctgcgacaaactggacccttcgctcccttctcttccgtttcactaacattttaatttaatttttttggtttgctattcttttttttttttttttttttttggtgagctagttttaaatatcctgggagcagcaatgtgactgatattctgttgtaaacctctaactccaaaattgaatctattgataaatttatttctctattttctttctgtgaaaatactgtgggtatttgtaaagccaaaatcgttttttatccccaactctgggactgttttgatgggagattgagaaaattatctgatcttttcagaattaacacgtttgcttctgttaataggatgtctaatataaattacgtaaaacctgggttatgcaggtagttgctggatttttcacttaaatctggaggtagttgcaagccaaatatatatcttttcggtattctcctatccatagtgggagacctgaattcctttataattgttaaaaacaaacaaacatgtgacagaccacttgtgtgttcataaacttataattgtatatatatactatatagtatatatgcactatatagtatggtatatatactatatacatgctatgtatacactatgctatatggtgtatatgctctatgtatgctatatagtatactctatatacgctatatattttgttgttgttgtagtttgtttgtttgtttttgagacagagtctcactcttgtcgccaaggctggagtgcaatggcacgatctcggcttactggaacctctgcctcccgggttcaagtgattctcctgactcagcctcccaagtagctgggattacagatggctgccaccgtgcccagctaatttttgtatttttagtaaagacggggtttcgccatgttggccaggctggtcttgaactcctgacctcaggttatgtgcctcccttggcctcgcaaagtgctgggattacagatgtgaaccactgcacccgaccttataattgtatattaaaacaataattctatcaaaataatataaaattgttatatgtacatgcttgcagatagttccggtatacattacaggatttagaaacagaatgatgaaaaatattcagttaagtgagtggcctgagacccactccatctgaaacatgtataatcccctctgtttaaccaatgttttggatttgagacttttgtcatatgttatttactatcatgggagagctggatagaatggatctttaatttccggctcagaaagcagtagatgggaatttagtacaataattaaaagttgcagcctgggcgcggtggctcacgcctgtaatcccagcactttgggaggccaaggcaggttgaccatgaggtcaggagatcgaaaccatcctggccaacatggtgaatccctgtctctgctaaaaatacaaaaattagctgggtgtggtggtgcgcacctgtaatcccagctacttgggaggctgaggcaagagaaactcttgaacccaagagacagagattgcagtgagccaagatcacgccactgcactccagccatctccagctctggtgacagagtgagactccgtctaaaaaaaaaaaaaattctaagtgtgtttttgattcagaaaggtaatgcatacaaagtggatggagcagctgaagtgatttgcagggaagcaggcttagaaggaacagtattgcagagaagcgatgtaaagagccagctggcctggttcaatttacagccctacaacagtaacttacctagggcaagttactcagcccccctgtgcctcagcttcctcctctgtaacatggagagtttcctcctctgtggtgagtttccttctcagttccctcatctgtaatgtgctaataataatggcacctacatcatggggttgtctcgagtactgagttagcatacattgaacacttggaatagttctggcctgtagtcccatagcatgtctttgctgttgtactcactctttgttatcttccttcccagcctgcactgttgcacatcagtttccccagctgccattttgacttctgctctagcaactggtattaactgagtgctgaccacttgctagccagcattgtatgaggctataaggagagagagtcttgaatgaggagtgaggtagaattgatcttcttaggaagatctagaaggttctgaaatgcagggaatagaaaaaggctatcttttgtaggatggcttcacagaagggcttgcgtttctgggaatgggttttgtcaaacagttctggtttgggaatgggaggaagggaagggattatagaggagcaggaacattttaggaggaaggagaccttttgcaggggcaaaggcactatggctggaaagtgaggagctatcctgtggatgttgggacattgggataatctgtgggaggttagttggaggaaagtttggaaaggtgggagaggtgggaagggacagcataaattacctgataaggaaagagaggcttgggaggtagattggtggggagatggcaagccgaactgtcagcagttacacagaagaggtgtttctggaataatccatctctggggtcctgtcttctctcttgcccagcattcccttcccatctgctccactgcttctataacctccatccaggtcctgcaggttgggtgggtagggatgggcagtgagtctgtgttttggagtcattccatggtggctgtcttggagctctgtttaagtggtctggtgctcagggcagttacccaggctactttttgttaacaggccatgccctaaaatctttgacatggatgtgattgttacaaccctccccatccgcatacacgcccatagtgtatgccgagtagctctttctcatcctgctgatagaatcatctactcacattttaacacatataacttcataacttacaattattgaagtagataagaactgtaatatgcacttaagtggagagtcactttggagttcccttgctttctcttccctgagagcattgttctgtggtagagaggtgtgcctgatgctgctgttgaccacctgtgtgacttcaggcaagacattgaacccttgtggtcctccttgccatcatctgtgaaatgatctctagaggccctttttctctcagataatcatttattcttctccccggatccctggaacagtccattattcacagatgcctatttgatacatctgcgactaatattttctgatcacttaatacatggagaacgttctgatgatggtcatgtcctcctcacatcctcctgtgagggttggtacctatttgtgtcctgtttttctagttgaggagacaagggcaaaggcagtttaagaaatttgcccaagattacacagtgaacaagtggcaggtgtagaaccagtctaactttgtagcccgagccttacccaataggctatgctaccttaggtataatacagctacagctgctcttcgtgtttgtggtggtgatagttgagaagtacatggaaggaagatcattggagaaagggcatatttggagatattgatttggtaaaatttgcctggcgggggccagaatatcaatgtgaatcttgtctatgaaatgtgctccatatggagacaggagacatgtggatctcattgcaggcatgcactctgtcttttcaccttgtttgaacaaaacccacatagcacctggttgtctagcagacactcaatacatgtcaattgaatgactgtcccctttgaaaaaggaagttgtgaccacactatttttatttaaaaaaataaatagagagactatgaaatgtcccaagacttgtgggaaaatgggtcagatgccaggtaaacattctacttctgcttttggggcatctcagtttctctttttatttctggacatgctgtggttttgggctaagaacttctcatggtgaatatcaatgaaggtctattttaggtatatagttattaatcatacccattctggatttggcatctatctttttgggaattcattccttaaatattttgtgtattgaatcaactttaaaatatttgaaaaatgttttaggttgctctttatctaatgtagttgctcttttcagtatggcatagtgactaagcacacaggctttgaagtcagactgtgagggtttgaattccagatctgattcttaccaatgtggccttgagcaagtcactttcctctagaagcttttattatctgtaaaatgggggtactcatatgcattacatgagaaaagccatggagagcattcagtatattgtctggctcacagtaaagcctgtacatgtaagcaattccttttttattgtggtaaaatatataacataaaatttaccatcttaaccatttttaagtatacagttcaatggcattaagtacattcacattgtgtgtaaccatcaccaccatccatctccagacatttttcatcttcccaaactgaaacttaatactcattaaacaataaatccctgtaccccttactttgtcagcttctggaaccaatattctacttgctatttttatgaatttgactattctaggtacctcatataagtggaagtatataatatttattcttttatgtttagcttatttcatttagcaaaatgtcttcaagtatcatccatgttgtggtatgtgccagaatatccttcctttttaaggctgaataatatttcattgtatgtatataccatcttttgtttttccattcattcattggtagagggacttaggttgttttcacctgtgatgattagttatgtgtcaacttgtctaggccacagtactgagctatttggccaaacattatcctaaatgtttctttgaagatattttttagttgatgatatggtttggctttgtgtccccacccaaacctcatcttaaattgtaatccccataatccacacgtggagagggagggacctggtgggaggtgattggatcatggggacggtttcccccatgctgttctcatgatactgagtgagttctcatgagacctgatggttttataagggactcttttcccacttgctttctctgtttcctgccaccatgtgaagaaggtccttgcttaccctttgccttctgccatgattgtaagtttcctaagcctccccagccatgtggaactgtgagtcaattaaacctctttcttgtatgaattacccagtcttgggtatttcttcatagcagtgtgaaaatggaataatacagatgaggttaacatttaaatcagtagactttgagtatggcctccataatgttggtaggcttcatctaatcaattgaaggcctcaatagaaaaagattgaattccactcaagaagagagaattctgcctccagcctgcctttgaacttgagactacagcaagtcttccttgcaccttcagcctgctagcctaccctgtaggttttggacttgctagccttcacaattgtgtgaaccaattctcaaaatcaatctgtccatgtatgtgtgtgtgtgtttgtgtgtgtgtcccctgttggttttgtttctctggagaacccgggcctctaattaatacaccatcttttggctactgggaataatgctgcgataaacattggtgtacaaatatctatttaagtttatgctttcaattattttgggtgtataaccagaagtggaattattggattaccccttatttttaatattttgaggaaccatcctactgttttttcacagcagctgcaccattttattttacatccctacagcagtacacaagggtctcaatttctccacattcttaccaacacttgttattttctgtttttaatgtaaaaaataatagacatcctaatgtgtgggaagcatcttgttgtggttttgatttgcatttccctaatgtttagtgatgttgaacaccatttcatgtgcttattggccatttgtaaatcttttgcccattttaaaattagggtttttttttcgtgtgttgtagaagttctttacatattctggatattaattccctatcagatatattatttgcagatattttcttccattcttcgggttacctttccactgagttggtagtgtcttttgatgcataacagtttaaaatgttgatggtctaatttctttatttttttcttttttgcctgcacttttggtgtcatatctaagatatgattgccaaattcaatgtcctgaagctttttccatatgccttcttctgagaattttatagttttagctcatatgtataagtctttgttccattttgagttaattttgtaaatggcataaggtaataggtgttcaccttcattcttttgcatgtggatagttaagcaattcattaataatttttatcaacgattataatgtttgtctctatgtagatatcataagcatagacatagccatagtttaaaaatattaattcattcttgacatcatttttctaattatatctaaagtactgattttttcttatagaattactaaaaaattctgtacttggatcaggtgcagtggctcacgcttttaatcccagcactttgggaggctgaggtgggtggatcacttgaggccaggagttcgagaccagcctaagcaacatagcgaaaccccatctctagtaaaaacacaaaaattagctgggtgtggtggcatgtgcctgtaatcccagctacttagggtctgaggcaggagaatcatttgagcctgggaggtggaggctaccgtgagccgagattgtgccactgcactccagcctgggcaacagaacaagacaaacaaaccaaccaacccctacactttatagcttttagtatttccaagaaagaaaaactattcttgtggtcaaatggcattggtggctgatagctattttttttaaaactatttttacctttttgtggtgtttagaattaaaaaagcaacatccccatgttgcaaaaaattgaaatagattgtagagtcaaaagtaatggttccccttctatttacatggtttcttcccttccactactctccccacaattaaactttgttaatagtctgctctatatttttctagaccttctccaagagtccattcacaggtatagatttaaacataaatattattttaaaatatacatgggaccatattttatgcattgttcagaccttgtttttttaaaaagtctcagcggtatcaaatacacacatctcagtctgtccactgagacccagagatctcgtgaacatactgtgtcctggagaacagacactagcactcaagtgaaagaatgttctttttctataacacgtaacagtggtattgggttacatttgttgaatgaatgttctttttctataacacgtaacagtggtattgggttacatttgttgaacgaggcctgtttgccctgttccctctctctggactcttggctcctctctgtgagccatcagattgactgtttccagtctcgtctgactttcaatgtccctgccaaggactctcacattcgtctgtctcagagaaagctcggaagacaacaaatcctttcccgcatccacccatcaccgcttctgagcagcctgggcccctctggtgccatcaacaatcttgaagtggcaacaggtccagaggcaaatgactccttccttcctgctgttttatgcaaagattgctatcttctgtggcttagtttatttctccttcaagagaaatttaaaaaaaatgaccagcaaggtggtgctttccacagcaaggaagtgggtggtatgcctgcacctttctccagaattcctggaattccaaaggcttaaaaacatacacaatattttattaaattctttttagtagatgagaaaattgatttttaaaaattatgcttatggaaattgatgtttagaaaggtaaactgtactacttgtaaaattccacaggcttaaaaacacctacacaatattttattaaattctttttagtagatgagaaaattgatttttaaaaaatacgatatgcttaaggaaattgatgtttagaaaggtaaactgtactacttgtatagtaagcaaagaatatgaaaatttgtctgattttagttctcttttcattcaacattcccgttgcctccgaaagatagcacattgcccttgagaattctacagactagtcctgtggtacctaaccaatgtacagctgaattgcctgtggaatatttaaaaaatacacccatgcttgtcctgcccctggagattctaattcagaaggtgtggagtgaggccaaggcatctgtgaaaagctccccagagagctgatggttggcctgggttgagaaccatggatctagtgggaggagtttcccagctaaagttccaaaccctcacaggtgagctggtgtccttcattgctgatgatgcttagaactggcctcaagcagtcacagttggaggaaagctctacctaaggtcctaattaaaaacacataaattggatggaaactccttcttcttgggatgtttacagaggttacctttttatcctgttgccttattcccatgaaaactcacttgtctaactaagctgaaaggtggaatctttctcaccaatatttgtagagctcctattaacttcacttttttgggagccaaacttccctcagtgccgcagttatttcgtggtagtaacataggtgtttaggagacatctgaattccctctcaatgacctaaaagtataattagtccattttctgacatgagtcaacaactagggttgccacatagacccaattcttagtagagactgtgtctatctcggactcagagttgaccactaattacatttcagtaaaaaaatattacttttaatttatcttaaatttcacagaggaaaaagaaaccaaggtgaaatttaaggaatttctgaacttcagacaaatatctcttgaaacaagacacgttagttccttaaagattcctctaaaaaatatcaaactgttgggattattaactactctcataaaattcagaatacattcttcatatccaaatagacctacattttatataactaccctcacactttaaattaaaaaaagaaaaagttccagatctgactttgatatgtctaggtatggatcttttttttttttttaaacaccttttctcctgatatgtcctttcaatttgaggatccatgtctttcttcatctcagggagtttttcaccaattatctaattttttctttctctctccttacaaaccaggcataattcagactaatgatcatggcagaatgttaaaggcagattaaaagaaaccaaaattgagagctacatcataataagaaatgcatttagaaaagatttggggattctatctgtgtatctatcgatctatcaattttttttttgagacagggtcccactctgttgcccaggctggggtgcagtggcatgaccatagctcactgcagcttcaacctcttgggctcaagccatcttcctgcctcaacctctcatgtaactgggattacaggtgtgtgccactgtgcccagctaacttaattttgttttctttgtaaagatgggatctccctatgttgtccaggctagtcttgaactcctggcctcaagtgatcctcctgctttggcctcccaaagtgctgggaaaacacatgtgagccactggacctggtctaaatactttatattaatgaaaattaagtaatattaaaaatgttagcaaggaagaaaaaaattatagaaaatgctcacagcaaaatcatgccatggctaaaccttggggataaagaccagaggaagacagagtgaaaagggagtaaaaaaggttgtgtagaggaagaatggggagttctccttctccttcttctcctccttctccttctcctcttcctccttctcctcctcctccttctcctccttctccatctcctcctcctccttcttcttctccttcttcctctctttcttctcctcctcctcctccttcttcctcttcttcctcttcctcttcctcttcttcttttattgagacacagtttcactctgtcatccaggctggagtacagtggcacaatcttggctcactgcagcctccgcctactgggttcaagcgattctcctgcctcagcctccctagtagctgggactataggcacacaccaccacacccagctaatttttgtatttttagtaaagatgaggttcactatgttggccagactggtcttgaactcctgacctcaagtgatccgcccacctcagcctcccaaagtgctgggattacaggcctgagccactgcacctggcctctccttgctgcttctatgacttcttggacagtttgtttccagtgggggagcagacagatgaatcaatacctcatccacttggggcaagtttgggaacttctctatataaattaagcctcattttcctcaacagaaaattgggcctgtttctccttccttctaaatgtcattgcagaggtttcatgaagcaatgtgtgtgatgggactttgtccaatgtaagatactttgcagaagtgagtgattctgtgaccacaatcttgctatgaagctttttcttcacaggaagatacatgaacaactaatgactgagtgactgttggttaggtttcaacctcttctcaggcttcttcttgttttaccctcatggacaacttgtcgggaagaggctattattattcccattttattgataagcccagagaggttaagtaactcatgcaaggtcacaccgtggtgaaatcagtatttaaatacagggtagcttcactccagtgtctgaactgttaacatttatgccatgtgtaacattattttcaggaatgaaacaatgttattggttgccacttttcagagaattggcaagtgctcaggtttaatgcaggtgggcagaggcagaggtgtcactgggtgctctagcctctgtatcctgaacttccagcttcctcttactgtccatttgtgatcctgggagagagaaacactgtctcctctgtgcctgatccactcttgttcaagtgtccagcaccctttccctgaattactgcaaagacctctcaaattatctgtggtaaaggaccatttcccaccccaccccctgagtccattgtagccttatatttttataaaaaaaaaaaaaagtcttgcttggatatcgccacaatgttaaactacttcaagatatttaaaagcctctaaacacttcatctcagttcctgtccttgtagatggtaacagcttgcagactaggactggtccacagggtgtggttgaaatagcactgctgcaagggtctcctgactttgattctttccccgtataacctatgcaccacagagtggccagagtggttcttgaaaaatacaactaaaagtcacattgtttccctggttacaccctccagtagcttcctattgcatttaaaataaaatccagatatttaccaacggcccaaaagtccctgggtcatctggccctgcctgtatccacccgctttcatctcctcccttgcccgctggatatctccaatgctaatgaaacataggtaggcttgggtaaaagttgtttcaaacagggaacacataataatctgggatgtgagatacactctgttttgtcctttcctctactggatcaagcatggacaagtgcttctatcactttctttccagcagcgagagccatgccactaatttctgaatgagcaagatgaccaaaaccaagtctcagaaaagatttgtgcaaaactgtgcttatgtagtgtagcctgttgcctctctggtgaactcagcctgaagatgcctgtattctgttgaagtctcatacctgctttttagactctttgtttcctcccccagaaaatgggtctgtcgtgggtcgagatgatggaggggtcattccaaatgttcctgagattggagaacaaaaggttgaccgtgtggttgttgtcacagactcattgctggggagtgtggctaccattgctgcattggttatttaatgactgagggggaaacacaaattttggttaaacaatttcctggtgggtttagtgcttgctgcccagagagcctcttgtgtggaggcacccgggagagacacccatctcaccacgtgctctaccatggcaatgaatgagaaagaagcagctacatggaaaatggttcatttagcaacagacagccatagtttctaggaaactgacttcccactgttctccctaacatccccccaacccatgactttttaatccattgcctattccaatgatttttggactttcagaagaagatttcattgtcttttgctaattaattgccatggcaatggcaacaattctcacattttagtggcaggaaatttatgtttaatagaatggagaatgtgatgtagcaaagtgcgtctttgccaagcatcccaggtgattctggcataggtggtccaaggaccttactttgaaaaacactggttttaagattgtctgttctgtgtaatgatactggtattgagtgcaaagagttttaaagaagttctgtttctgcccaagatggagtaacagggccagatttacccttttgcctgacacaaccaaaaatgtcagataaaatacatgaaataatgatttttgaaacaccagtcatcaggtgatgaacagcagtaatctctaagaaataggagacaaaaaggcgtacactcggactgctccagcttactgcatggagagaatttccaggctgagactcagggaaaggaactcaagtgcaattcagactcccaatttgaggagaaggtgtgaagaggctggggaaaccaaggtggttagagttcatggaacagagtaccaggaatgagagagctgcatggagagagaggaccccgataactgcagagggggccctcaaggattcagcatcgtactgaccagcacctgtatgtggggaaactactggagacctgggggccaagcttgtggggggaagagaacagagcctggctctcaccaaaggctgggaatattgcctgttccttccagccagactgggaaacccataatccacagggtattggtagaacagtcaggagggccttgcctcagtagtggggaataattagcagtctagagcactgctccatatttgcctaataaatcataaaaaagcaatttgcaaaagtattaaactgcatctaagttacttaagctcatcccagaacagagttcaagaatatttatgggaataaaaaaaaaatccggtgccaaacaaggtaaaattcacagtatctgacaccccaaaatagtaatgtagtttaaagtggaaacacaccactctccctgactgtcctggaggtgaacttccatgcacatttttgtacccttaaagagtccaacagtttaaaccttcagtgtaacattttatacataacaatctagagactgccaaaccatggtctgtgttgatatttatcttggcttctgagatagcacttcctctttcatgtctatgagtgtttcagaaaatattttttctgtgtttgacaccttcaaccttgccattgcattatggtaaggtagattcagctaagatattggctaattacattgtgcatcctaagaggttggagctaagagtcgtaggtaatggtgatggttgggtgagatgggacaagttttctgaggtcaatgtatgactcagattcaaaggcttggagagcagtaaggaccaaaccaggcaggccaagatcttggacaggtctgagggggctagctaagccaagttctagaaccagaagccctttggaacccaacaggaacatacagagagtgaagtgagtaaagtcttgttaggacttggtcaagactaaagagtcagggtttgttcattggcagaagttggaggctgggtcagagaggagtgttctgggatcatgcatggacttactgctctagaggttcataactgagctccacaatatgagcctgggatgtacattcttcctctgagatttggaaggttttaaatttggtttccaggcctatttgtccgattctctcccatgccccaaattcaacctgacactctgtcattaggatgtccctagttagacacttgactgccagaacaaacatgttttcttcagattgtctggcacctgggcattctttcccactctgcctatacagaaatgtggcttttctgcatacaatttacaaatcttttggctgctggaaaacactaagtttcttaaaatattgtagcccagatgaatttgtgggaaagttcctacttgaagatgatcacaagatattactgttatttgatagaaattttacctgctccgggagatgagaatgggactcaaggattagtctttgggaaaagtggaaatgagttgatcttttaaaggagggggtcttaaaatcactttttcacctagaaaggttttcaataaatgttcttggagctctttattttcattcccaatggctattgtaccatggattgagtaactagagttgggatgcagggatgaagaatggatgctagtcagtgttgtcatgaccaccatgatggtctggatggcgagaacaattcacttacagtttttaataatgacaaagacaataacactagaaagtagatagagtaagtttatactttaatttctttcagatcagtatggactagaggagcttctgccctctctatgttttccaaagagagaaaaatagatacagaagagattaagagagcataggagggggcttcaagatatttgactagagacatctgttattcaccttctccacaaaagaggaccaaaacagcaactagataagcacgatgtcaaatagagtatttaagagagaacacaggaactcagcaggaaagtgacagaaaacctctcaggcatggaaggagaggaaagcaaagcagctggcccagctgagatcggagccaggagagactcctcagtgcaggaaaagggaagggagagagccccatgttccacatttccaccatggactactgcaatcctagctacagagtgccctttggctctcacagaccctgagactagtataggaaacttcctggagcccacacgatggcattgtctcagagagggatttcaccatgggtcacacacatagcccaagactgaagcaactgcagcgtggtgccctttcgagagcccaggcccgacaagactgcatcttgccgtggagtccaacagcccatgcatctccatatccctggagccccactgacatccccttacatctactcagatggttgcaaaataccaatgacattcttcacagaaatagaaaacacaatgctaaaaattgtatggaaccaaaaaaggacctaaatagccaaatcaatagtaagcaaaaagaacaaagctggaggcatctactacctggcttcaaaatataccacagacctatagtaagcaaaacaacatggcattggtataaaaacagacacatagagaagtggaacagaatagagaattcagaaataaatccacatatttacagtcaactgattttcaacaaaggcatcaaaaacatatattggggaaaggaaaccctgttcaataagtggtgctgggaaaactggatattcatgtgcagaagaatgaaactgtctgaatgaatagacccctgtctctcactatataaaaaaaaaaaactcaaaatggattaaaaactttaagacctgaaactataaaactactagaagacaacataggggaaacacttcagggcattggtctaggcaatggtattatgattaagacctcaaaagcacacataacaaaaacaaaaatagacaagtggggttatattaaactagaaagcttctgtatagcaagggaataaacagaatgaagagacaaacttcgaatggaagaaagtattttttaactattcatttgacaagggactaatatccagaatatacaacgaactccatcaacttaacagaaaaaaaatcccatcagatatttcccaaaagaagacatacgaatgactaacaggcatatgaaaaactgctgaatatcactaatcattaaagaactgcaaatcaaaaccacaatgagatattatctcaccccagttggaatggctgttatgaaaatgaccaaaagtaataaatgctggcaaggacatggagaaaagagaactcttacacattgttggtgagaatgtaaattagtatagccattatggaaaacaatatgggggtttctcaaaaaaataaatgcagaactaccatagagtccagcaatttcgctactggatatttatccaaaggaaaagaaatcagtatatcaaggggatacctgtactcccatgtttattgcagcactattcacaatagccaaggtatggaatcaacctaagtgtctatcaatgaatgaatgaatgggtaaagaaaatgtggtatatagatatacgatgaaatattgagggatggaggagccaagatggccaaataggaacagctccagtctacagctcccagcgtgagtgatgcagaagacaggtgatttctgcatttccatctgaggtaccgggttcatctcactagggagtgccagacagtgggtgcaggtcagtgggtgcgcgcaccgtgcatgagctgaagcaggctgaggcattgcctcactcgggaagtgcaaggggtcagggacttccctttcctagtcaaagaaaggggcgacagacggcacctggaaaatcaggtcactcccacccgaatactgcgcttttccaacgggcttaaaaaacggcgcaccaggagattatatcccacgcatggctcggagggtcctacgcccacggagtcttgctgattgctagcacagcagtctgagatcaaactgcaaggtggcagcgaggttgggggaggagcgcccgccattgtccaggcttgcttaggtaaacaaagcagctgagaagctcgaactgggtggagcccaccacagctcaaggaggcctgcctgcctctgtaggctccacctctgggggcagggcacagacaaacaaaaagacagcagtaacctttgcagacttaaatgtccctgtctgacagctttgaagagagcagtggttctcccagcatgcagctggagatctgagaatgggcagactgcctcctcaagtgggtccctgacccctgacccccgagcagcctaactgggaggcaccccccagcaggggcagactgacacctcacatggctgggtactccaacagacctgcagctgagggtcctgtctgttagaaggaaaactaacaaacagaaaagacatccacaccaaaaacccatctgtacatcaccatcatcaaagaccaaaagtagataaaaccacaaagatggggaaaaaacagagcagaaaaactggaaactctaaaaatcagagcgcctctcctcctccaaaggaacgcacgcagttcctcaccagcaatggaacaaagctggatggagaatgactttgacgagctgagagaagaaggcttcagatgatcaaattactctgagctacgggaggacattcaaaccaaagtcaaagaagttgaaaactttgaaaaaaatttagaagaatgtataactagaataaccaatacagagaagtgcttaaaggagctgatggagctgaaaaccaaggctcgagaactacgtgaagaatgcagaagcctcaggagctgatgcgatcaactggaagaaaggttatcagcagtggaagatgaaatgaatgaaatgaagtgagaagggaagtttagagaaaaaagaataaaaagaaacgagcaaagcctccaagaaatatgggactatgtgaaaagaccaaatctacgtctgattggtgtacctgaaagtgacagggagaatggaaccaagttggaaaacactcttcaggatattatccaggagaacttccccaatctagcaaggcaggccaacattcagattcaggaaatacagagaatgccacaaagatactcctcgagaagagcaactccaagacacataattgtcagattcaccaaagttgaaatgaaggaaaaaatgttaagggcagccagagagaaaggttgggttaccctcaaagggaagcccatcagactaacagcggatgtctcggcagaaactctacgagccagaagagagtgggggccaatattcaacattcttaaagacaagaattttcaacccagaatttcatatccagccaaactaagcttcataagtgaaggagaaataaaatcctttacagacaagcaaatgctgagagattttgtcaccaccaggcctgccctaaaagagctcctgaaggaagcgctaaacatggaaaggaacaactggtaccagccgctgcaaaatcatgccaaaatgtaaagaccaacgagactaggaagaaactgcatgaactaatgagcaaaataaccagctaacatcataatgacaggatcaaattcacacataacaatattaactttaaatgtaaatggactaaatgctccaattaaaagacacagactggcaaattggataaagagtcaagacccatcagtgtgctgtattcaggaaacccatctcatgtgcagagacacacataggctcaaaataaaaggatggaggaagatctaccgagcaaatggaaaacaaaaaaaggcaggggttgcaattctcctctctgataaaacagactttaaaccaacaaagatcaaaaaagacaaagaaggccattacataatggtaaagggatcaattcaacaagaagagctaactatcctaaatatatatgcacccaatacaggagcacccagattcataaagcaaatcctgagtgacctacaaagagacttagactcccacacattaataatgggagactttaacaccccactgtcaacattagacagatcaatgagacagaaagtcaacaaggatacccaggaattgaacccagctctgcaccaagtggacctaatagacatctgcagaactctccaccccaaatcaacagaatatacatttttttcagcaccacaccacacctatttcaaaattgaccacatagttggaagtaaagcactcctcagcaaatgtaaaagaacagaaattataacaaactatctctcagaccacagtgcaatcaaactagaactcaggattaagaatctcactcaaaaacactcaactacatggaaactgaacaacctgctcctgaatgactactgggtacataacgaaatgaaggcagaaataaagatgttctttgaaaccaaccagaacaaagacacaacataccagaatctctggggcacattcaaagcagtgtgtagagggaaatttatagcactaaatgcccacaagagaaaggaggaaagatccaaaattgacaccctaacatcacaattaaaggaactagaaaagcaagagcaaacacattcaaaagctagcagaaggcaagaaataactaaaatcagagcagaactgaaggaaatagagacacaaaaaacccttcaaaaaattaatgaatccaggagctggttttttgaaaggatcaacaaaattgatagaccactagcaagactaataaagaaaaaaagagagaagaatcaaatagatgcaataaaaaatgataaaggggatatcaccactgatcccacagaaatacaaactaccatcagagaatactacaaacacctctacacaaataaactagaaaatctagaagaaatggataaattcttggacacatacactctcccaagactaaaccaggaagaagttgaatctctgaatagaccaataacaggatctgaaattgtggcaataatcaatagcttaccaaccaaaaagagtccaggaccagatggattcacagccgaattctaccagaggtacaaggaggaactggtaccattccttctgaaactattccaatcaatagaaaaagagggaatcctccctaactcattttatgaggccagtatcatcctgataccaaagcctggcagagacacaacaaaaaaagagaattttagaccaatatccttgatgaacatcgatgcaaaaatcctcaataaaatactggcaaaccgaatccagcagcacatctaaaagcttatccaccatgatcaagtgggcttcatccctgggatgcaaggctggtttgatatatgcaaatcaataaatgtaatccagcatataaacagaaccaaagacaaaaaccacatgattatctcaatagatgcagaaaaggcctttgacaaaattcaacaacccttcatgctaaaaactctcaataaattaggtattgatgggacgtatctcaaaataataagagctatctatgacaaacccacagccaatatcatactgaatgggcaaaaactggaagcattccctttgaaaacaggcacaagacagtgatgccctctctcaccactcctattcaacatagtgttggaagttctggccagggcaattaggcaggagaaggaaataaagggtattcaattaggaaaagaggaagtcaaattgtccctgtttgcagatgacatgattgtatatctagaaaaccccatcatctcagcccaaaatctccataagctgataagcaacttcagcaaagtctcaggatacaaaatcaatgtgcaaaaatcacaagcattcttatacaccaataacagacaaacagagagccaaatcatgaattaactcccattcacaattgcttcaaagagaataaaatacctaggaatccaacttacaagggatgtgaaggacctcttcaaggagaactacaaaccactgctcaaggaaataaaagaggatacaaacaaatggaagaacattccatgttcatgggtaggaagaatcaatatcgtgaaaatggccatactgcccaaggtaatttatagattcaatgccatccctatcaagctaccaatgactttcttcacagaattgaaaaaactactttaaagttcatatggaaccaaaaaagagcccgcattgccaagtcaatcctaagccaaaagaacaaagctggaggcatcatgctacctgacttcaaactatactacaaggctacagtcaccaaaacagcatggtaccggtaccaaaacagagatatagatgaatggaacagaacagagccctcagaaataacgccacatatctacaactatctgatctttgacaaacctgagaaaaacaagcaatggggaaaggattccctatttaatatatggtgctgggaaaactggctagccatatgtagaaagctgaaactggatcccttccttacaccttatacaaaaattaattcaagatggattaaagacttaaacattagacctaaaaccataaaaaccctagaagaaaacctaggcattaccattcaggacataggcatgggcaaggacttcatgtctaaaacaccaaaagcaatggcaacaaaagccaaaattgacaagtgggatctaattaaactaaagagcttgtgcacagcaaaacaaactaccatcagagtgaacaggcaacctacaaaatgggagaaaatgttcgcaacctactcatctgacaaagggcaaatatccagaatctacaatgaactctaacaaatttacaagaaaaaaacaaacaaccccatcaaaaagtgggcgaaggacatgaacagacacttctcaaaagaagacatttatgcagccaaaaaacacatgaaaaaatgctcaccatcactggccatcagagaaatgcaaatcaaaaccacaatgagataccatctcacaccagttagaatggcaatcattaaaaagtcaggaaacaacaggtgctggagaggacgtggagaaataggaacacttttacactgttggtgggactgtaaactagttcaaccattgtggaagtcagtgtggcgattcctcagggatctagaactagaaataccatttgacccagccatcccattactgggtatatacccaaaggactataaatcatgctgctataaagacacatgcacacgtatgtttattgtgtcattattctccaatagcaaagacttggaaccaacccaaatgtccaacaatgatagactggattaagaaaatgtggcacatatacaccatggaatactatgcagccataaaaaatgatgagttcacgtgctttgtagggacatggatgaaattggaaatcatcattctcagtaaactatcacaagaacaaaaaaccaaacaccgcatattctcactcataggtgggaattgaacaatgagaacacatggacagaggaaggggaacatcacactctggggactgttatggggtggggggaggggggagggatagcattgggagatatacctaatgctagatgacgagttagtgggtgcagcgcaccagcatggcacatgtattcatatgtaactaacctgcacattgtgcacatgtaccctaaaacttaaagtataataataaaaaaaaaaaaagaaaagaactattgagccacaaaaagaatgaaatcctgtcatttgtagcaacattgatggaactgcaggtcattatgttaagtgaaacaagccaggcacagaaagacaaatattacatgttcttactaatacatgagagctaaaaaagttgatctcaggaaagtagagagtagaatggtggttaccagaggctgggaagggtgtgggaggaggatgaagagaggttggttaatgggtacaaatatacattcatatagaaaaataagttctagtgtttgatagcacagtgaggtgactatcatgaacaacaatatattatatatttcaaaatagctagaagagaaggtttgaaatgctcccaatacaaagaaatgataaatgtttcaggggtgatagatatcccagatactctaacttgatcattacacattttatgcatgtagccaaatagcacatgtactctgtaaatatgtacaatgattatgtatcagtaaaaaatgttaaaaagagagagcataggtgagagctctctgcttttatctaatgagctccggactgccatactcctggacatgatagtaggaagtctcaatcaagggcaagattatgctttctggagagaaatacactggaaacttgatataatctaattgatgttaattgtgataagtgttgctggttttacttttggcttcatacatagtgacttatgttttgtggtggtaatgagtaaaagaggtggggtgaattgatgaaactgcttctgtgccctgataagtggctgtgttctgattggttctcagatgggagttgatttttctacaggaagagaattagcttaccattgtgaaaccactgaaggcaatgtcaagagaagtttactttacctccatcgcagtcttattcccacgtcctcacttttttctcttccctttatttccttccttttctccccagactcatgattgcctttctgtcagcaactctctccaggttctcattgacacagaaattgtaaagactcagaaaaggctatgatgggatatttttcctccttgtttctgtgaatcttatatttggattggaaatagaatttatataccaccttacgggatccttcttcaatttttctgaaattaagagagcccattttttttttcataatgtgttgaaggaaatagtttttgaaaagttgggaatggaaagaggtcaactgagaggagattttttactttgagatatcctctccctggcatgagatgagtccttgtgaagtgaaaagatgggggctatctttggaaaaacacccatccctgctcccagagagctctgggcccgcattttatggagaacagcatctgctctcacattgagcctggttaagcctttgaattttcctttgcatgtgttctcaatcactgatggtgctgaatcatgaggcatattgccagacgtgggaatgaaatttttcttttcttttctttttttttaagacagagtctctctctgtcacccaggctggagtgcagtggcacaatctgggattattgcaacctccgccttctgggttgaagcgattctcctgccttagcctcctaagtagctgggattacaggcatgtgccaccacgcccgattaattttttgtatttttagtagagacagggtttcgccattttggccaggctggtcttgaactcccaaagtgctgggattataggcataagccaccgcacccggctgggaatggaatattcctaatgaggaacttgatactttctgaaaaagtaaattttcaggaaaagccacaggcttgaagtgtatcatctttccttcatggtttggcacatccacgtaagggtgtaagttctgtaagttccttttccatgtgttagttaacaaatgacgtttagaaatatcctctttctcactgtccccatgccaaagatcagcctttcatatttttccttaattgtcaaagaaatatttgagcatctaaggtgatattctttattactgtggatgtgatttgggaaacaattcttggagggcaactctgagtctgtggtgaataaaaaagtgaggataaatgtgaatgaatattgtttctggggttctctgtgcagctggaaaaatgatgagcaagttagcttaattagctgagcatcttcctcttcttgaaagggctgtgatgcttgtgattggaaaaagccgttcttacgtggcatccttttaggaaagactgtggtttaaatgggcttgtttacaggcctcacttttgggcttacctccacctccaagccatccaccatcattagccacgtttctaaaattaacttattagaggaactgtttgattcattagataagtgggttttgattgggcgtggttatggggtttaggagggtctgctggttagttccactgagaccctgaacagtatgaaggggaaggctagttaagaagcagaaagaaaaaaggaagccattcttctcaaacattttgttggaagtctgctgaaagattcattttgcttctgggccccacagattgcatagctggttctgcctctatgctttcaggtcgctcaagtgttaacaggagtgagaaattagaatcaagggcccatttcctcactttcttccaagtttctgtatccacatgtgcactgtatgaaactgctgtccatactcttgtcttaattgatttaatgtttaatctcctttaacagaaggtttgcagaggtctcttttcttcttctagtacaacttgcatacttatttagagtctgtagttaaaagggtgattcaggtcttggcaatatgtgaaacttctgtcctttgaaaagaagtcatttttaaaatcttggtttactttgttttatggtaacaagacaatacatcttcttatttatttcatatgtgcactccacactcattccagcaggccttatttcttaagcaagagacaagaaatggccttattgactggcaggtacaagtgctgaaactagcactaatgactgtgaatattcattcctgagtcgtatttgtgttcagactcaggtgaggggtgcagactggagtgttcgtctattccccttgtgtgggttaagataagcatgagatggtcggcttaggttggcccaggtgagagaagcaaagtgatgggtggccctgttccctgtgggaggctttacttttccatgcttacacactgaacacctaagctggctggtcaaataatcaagaggcagacttggtaaaaatgtgaataaatgagtgtagttactatatagccattaaagaaaaatctgctaatggtgactcagtagtgcctccctgattgtaaaggacaatgtcttctggtgagctgtgagcatgttccatgggttgacaatcagatttacatgtctgatgacattaattgcagggtgctatgggccaggtttctgaagttgggtggaggtggaggccaccggcagtgagtacaacgcccaggggaagcatgtgagtgggaggaagaaaagagagttttctggagctgttgcaatgtgtatgctggtgaaatctacttgagcattaagcagtatctcccagcattgttagctactgagtggcacatcttcagtacgcatgattcgtgggggactcaggcagaggtaaaagtgtggtaagttttaatactgtgtttgcttactagttgcttttgacatgcatacaggttgtgtgtgtgtgtgtgcatgtgtgtgtgtgtgtgtgtgtgtaaaactgactgtaagatgtcaagtttcagcctattgatttttttattccagaaacttttcagcattacctaagaagcaaaggctcaattttggctgcttcattcttatctcttctgccacagttctaacgtgcctgatctactgagaccaaggatgaccaatgactcagaagggaaaatgggatttaaacacccaaaggttagtttggcgtttctgcagtaacctttggtgtgataatgtgaaaagagcaagaacttttgattcataaagacctagtttgaacctgactgtaccgtgtatttatgacattgtgcaagtaacttattgtgggttgtggctgatcaaggcaaagttaatactagcctaatgctgatgattctgtagaaattttatttcattttatgttgggatctagcattgtgggtggataggaagagttgatgttgaagatatgtgccttaaatgcttctcttgatttctgtagcattttcttcctctggggccttcaggaatctggcagctgaagcgttaggtctaccaggcactctttttatccatccttcccatccatccatttatccactcaacacttaggtactgaaccacttactgtatgccagacacagttctaacagctaaggattaagcagtgaagaaaatagaaaaaaaaatcctgtatacatggagctttcattctagtgagggaggaatgcaataaacaaaataagtcagtaattatgggtatattaaaagggaatgtgttacagggtaaataaagcaggaaaagagggtagggtattgaggcaattttaaataaggtgatgagagcaggtctcattgagaaagagctcccctgcagagctctgaaaacaatttgcagacagtgccttcttgttattaccaaccagcagtgctcgttgccttgtcttcctcttgtttattcactgaggcctcaccatttttggtccatgaaaaaaataattgtttgagagcatagaatatgacttttgggttttcccttagggctatgttaagatgctagtagatgctagttaaaggataccttggtgaggccctcttttccgcccttgctgggttctggaaatgataccttctgctctgttatccatgtggccttatacattgggtacctacctgcagagctttttgtgcataacctctctagcccctcttgtacgccccacacaaacctctgactatgcagctaagtatagtcccttgtagggctaggcctctgcttctagtcttttccctgctttcttggaggagcaggcaggcacgggttgccaacctaacttcatgcttttggataacagcaacctctgccttcaccatttcctgacccaacatagtgaaaggagagtgtctcatcaccaagaaaagcctctcactttctccgtcttggtccaggaggtaggagaacaaagaggagcaaataagtcaatcacatcatggtgtcacagccaggctgggacctggaagcaacctttgcagtacgaggatgggatccacatcaagaagacacccagtcttctttggcccatgatggatcatgagtcagtgaatgtttcattagctttcatgaagggggatatctgctttctggtaattttcaaaatgttaaagaacccctttcggagctaggagcaaagtttagcgcgtgaagctctgtgaaggcaatggatgccttttaatttgggatttagtagagcttaaattccctctgatacatcctaagttccccaaaggcaatgtgaatggatggggtctgggcaatgtctgcacctccagctgagatgggatacggtagggtttagctttcatttcccctttcttttttttttgagaccgagtttccagttgcccaggctggagtgcaatggtgcaatcttggctcaccgcaacctctgcctcctgggttcaagtgattctcctgcctcagctcccaagtagctgggattacaggcatgcaccaccatgcccggctaattttgtatttttagtagagatggggtttctccgtgttggtcaggctggtctcgagttcccgacctcaggtgatctgcccgcctgggccttccaacgtgctgggattacagtgtgagccaccacgcccagcctcatttcctctttctgatatggatctcagaggtggcttctccttggctaggaatatgacattgccacaccagctgcagcacgtacgcacacaccctggggctttccaccccacatcattctgtgccagttgtgttggcctttttctgcccactgaggatctagagagacaatgatgtcagccagagctgctgtggcaggtggggctgttctgatgtctgatcaagtggccagagcctccttgccacattcagctcctgcccacgtcctctaggctggccccagtacggctctgggccactttccatgactgtgaagtatatttctgcccagcttagtagtaatgaggagtatttatttttatacgtttgcttgttgtttcaggtggtaagagttctgtagaagccaggctttcctaacatcccaagtccttcttaggcagcattttggtgctccagttatatacctgcccagttctgtccaatattgagttccaatctatacttgaaaagacaaagatgaacagtaacaggagagtaactgttgggggtgggggtagtgggcccagctgcactgacaataacaatcccttccccacccctccttggttgtctgtgaagctactctaaggagtaattcttccctggaccataccctgttgggaagcgaggtgtggaggtgccaggcagtggtttggggggctgactctggcccttgacctgtgagtcacagctgtgtgggagatgcagtatcagtcccttgatttgtttgtttttctggattgcacctttgttgacagtctggcacttactcttgtgcattttgttatttattttcaatggtgcaaggccccagtgttccatcctccttctgaattcacagaaacatccacgcaaatagactggccttggctcggactcacatttgagagacttcaatctccttggcctgtcaaaatgaagttcttcttaaaagtcctaactctctggtgctggcctatagtctaatcaatgcttcccaacctttttcatgtcacagtatacatggacatgacatgatttatgtaggtgggagggctcattcctaggcagtaggccatcggggtctggctactatagtccttgccccctcaccctcacctggctgttcctggggcttagggaaatttgtgtttccctctggcacacctgttcccactgggggcacacaggtatgctacagctaaggttagaagttctggcccaagacctagcatagaccacaatctcaaggtgcaacaaagtgtctcgtccataaacatctttgaagatgatcctagagggtggatgtactttcccaggatgttgtaagtttgggagaaccaagttcctgtggttgcgcccattgcttggtgcagtctgccaccacctgtccttctagaaggaagggtagaaggatgccaacactgcatgtcccctgtcccctccaggccagcatgaccaggatccttggctctgtggccaaactctaatgcttagcactgcttctttccatcctaccatattctggggttatttcacatgacttccacaggttcctgacctcccagctttgctacatcttctgcatcgcttagaacatcacttcttatgcaatggttgcaggtgtcatagacgttctgctgatgttgtctgtttgtgttgccgtgaaccacacctggataactggtctgggtggaattcagctactgcaagagtacatactagtcctcttttagcccttatgactgtgtggtaccaggtggtggttcttacatttaaacagagctatgggctcatccatccattcattcatttatttactcgtttaacaaccctattcaataaatgctgggtactgggaatataaagattaaagtcatagtctctgcctttcaggagctcacagtgcagtgagggagatccaagaagtaaacaattatgatatgcatgagaaattccattgggttctgtgggaacacagaagaaggggaagattcttgcacttggagagtggtcagaggaggttccctggctgagatgagataacttttagcttgaatcttttctcctcttcctcctcctcctccttctcttcttcctcctccccctcctttctcctccttctccttctcctcctcctcctttctcctccttctcctcctcctttctcctccttctcctcctccttctcctcctcctcctttctcttccttctcctccttcttctccttctcctcctcctcctccttcttctttttctttcttctctttctccttcttattcctttttgaacagagttatctgggatgtgtgctaattgaatgaaggaaggaagggaactgcatagagctagagagcggaacttcaagtgccaccattttgtttggtcatagtagaattctaatgggcaacagtagctaatgaaataaggatcacttaaggagggagaggagacctctacattagcctgcaatagtcagatcatacttttggaaggagaatgtctgtgggattcactcatagaaaccctggaaagtttccactggaggagaaagaaatctagatggcaagctggcttgaagagacttgttatgtgtggcttctgtgagtgcgggaggatggtgggggagactgccttctctatcctgcttctttcattcaaaagacagcatgatcttgggcaagtgccatgacatctccaaaccagtgtcctcatttataaacgtggttctcataatacctctcttaccagggttgatatgataattaaatgacataatttattgttgtatgaaagaatctaacatagtaactactcaacagatgttaatttctttttccttcccatgtatcttttttctcttcctcttttccttctcttttccctttcccctgccttcatacatcagctctttattaggtaagtaatatttgtcaggcatcctgcaagttttacattgtccaatatggtagccacgagccacatgtggctattgaacaactgaaatgtagctagtcccaattgagatgtgttgtaagtgtgaaatacacacagaagttggggtagttaacactccaccttgtccccacaccatttccagggcatgctttcctatgcgcaggagactagaggcattttgagtctgtggaggcttttcctataaaaagccagtctttgatgggtttctgaggtggtcttcaattgctgaccagtaagctcaccttccttcctgcaatgacatttttataaatgacagtcttgcttttaaattcctagtatgtggtcttaatttccacacaagtctggaaatgttgacttagtacaaaaagaaaaaaaggccaggcatggtggctcacacctgtaatcccagcactttgggaggcagaagcaggaggatcgctgtggccaggagttggagacaagtctgggcaacatagtgagaccttgtctttaaaaaaataaaaaaattagccgggtgtggcaatgtgtgcctgtagtcctagctatttgggagactgaggcaggaggataacttgagtccaggagtttgagactgcagtgagctatgactgagccactgcactccaacctgggcaacaaagcaagaccttgtctctgaaaaaaaaagaaaaagagaaaaaaatggaatgccaactatctcattaataatttttttctattgagcacatatttaaatgacaacattttggctatatttggttaaataaaatatattattaagcttaatttcactggtttctttttacttttaaaaatgtggctactgaaaaattaaaattacatatgtgtcttgcactgtgtttctgttgggcagcactttgtggagcttatgtctgatggggggaaggtagaaaagcaacaacagcaacagaaagatattttaaaaataaatgtaaaaaacaacaaatacaaaattacacattgtgatgcatactgtgaagacaagtttctatggaaaggaaaatgagaagacctaacttcattcagctggcccatggaaggcctcgctgaggaagacacatttgtgctgtgccttgagggaggctcttcccacagagtttccagccaaaagtggagacagagcattccaggtagaggaaacagccttccggggagtatttcttgagattcccaaacacttgtggtcagcaatggggagaaacagacccatgaagggtcccctgacttttcagagcttgtggtacggggagacaggcaggacaggcatgtgctctaggctacagggatgcgacaagtagtactggctctggaagcacttttccttcctttcttctctctgcctctgaagcgtcactgaccacagtcctgcccttggaggtccctgggctggtctgttcttccttcatggtgggtagtgaataacactcgcatttgtcccttgattccttgttctctcccgcggctctgactcagactcaccatctgggaaatgagcgtctgcagcagccacttaaccagtttccttgcctccagcgtctttctccctttcatatactctgtgtgacgctgccaaattaatcttcctgaaataccatttagcccgtgtaacttccctgatagcaccctgctgctggcagaggagctgtgtgctgggagcttctggacgtctctcacttttcacctttaccttttccttctatgggcaatgacaccgtttgcagagaagcatgttctactgccagcctctttagcttgaggaactcttaaagtctcatcttcagccatcttcccatatttctactcttgccttgcattttcttctgggccaggcatacttgagtcatcattctttaaatgctaagggccactacctcccagggaagaaagaatattaacaacagctcaggttctggcatccatcaaactagcttcaaatcccagctctgccattaaactagctgtgggaaccttttcaagaagtcatttatcttttctaagccttagttttctcatcagttgacaccatgaggctaaaagtaatttgtatcccttggggttgggttctttagatagtactgcagatagacttaaggcaagttagccataaagaactttgttattttagatggaaaaaaattatctgccaaaaaaattctagattttcttttctctttcgaaatccattagttttagattgcaacagactggtcacaactccaacaaattaagctacaaagaacagactgtcttagagtcccctaagtaattaagcaagatcctttgcaaattaggaagctttaagtagaaggaagaatctagttcaaggttggcttttatatttgcagtcacaggcacaaagtgagtccatgtggctataatcatgtttctgaattttttggatgaagacgtaaaaatctcatatcctctatttatgtccgtattttaaaataggtatttaaaatacataaatgtaatttaaaattataatatatatgctttttgggacaccacctacatcaggaatgactgagcaagagaccgcctttctttctattgatctctttggaagatgtagtgtgtagcagttagtcaacaagagaggactatgacacctggtccagagttagtgcacaatagatatttgtaaagtgagaataaatgagggtcaataaaaaagtatttcaaaaactcccttatggtgactgaaatgtctatagattactgcagtatttgatgacaagacaagaaacaaaactccaacaagagttcaaatgtcttgtatactatattttaaaaatctgttcaaaggaacaaggtgaatatagtgccatcattctcagctaccctcatgatagtccttcttactttgggcccaagactttggccttttttttctatttgctcagaaccagtaaaaatctaatgattcagtgactgtggttacagaatgctgggaattgtgatgaggttgggagaaacattggaaactgtccttgaccaagggttccaaccttatgaaatatgaaatagacctatttttaacatctgaagatttccagatctctctccatcctgtcctgcaattttattgtgggtgttttagtatctgttgattgagaagaaagatataccagttcatgatgacctcttgcaatgcaactttggccgaggaatcttcagttcacctgatggaaccactaacattttagaccaaatttctaattgtattaatgaggcacaggaccacttttggtttaggaatagcccgggtataattcagaaaagcataggatgttcaaatagagatttgaaaatatccagaagtcacaaccaagacaactcaggacaccagataagactggtgttgcttgagaaatcttcaccctgagctgttgcagtgttcattactcaatggaaatcccttcacggatcaccacataaaatgcagaatgcttagtgaaatttgaattttgaataaacaacacgtgcactatatggaacatacttgtgctcaaaaactacctgttgtttatgtgaaatttaaatttcactgggtgttctacacttctgttgttgctaagtatggtcactctaccttcaggtgtccacagtggtgccaagggttgaaggacaggaactaaaaacatgggttgtattccagcatgactgtcaacatagattactgatgcattttctgggaacctttcgcatctctaagtctgtaaggctctatatttggttttcccagggatccttgttctccctcaggggtgtgcaacccaacctgggcagtggcagcccagaaggaagttgttgatttattctcttggttcattttcatttactttgaggttttgtcatgaatttgtatacctgaccttctgtgaagtgagggcagaatcgaaggtggggatttcttggggctgaagtaatgactttaagggtgaaatcaagggacagaggaggaggcaggatggaaggagacttcagctcacttggaccccttgtttttttctgtacaggagtcagaacattttccgagaagcatggcagactagaaactctccaccttttcttgtctaaatttgaatttaaaggagattggaatttagctgctcagctctcttttttttaaacacagtttccttctccctctataagctaagtttaaaagaaaagctggcattgtactgttttttaaatcatttatttaatttataaatgaaatatcctaggattttaaattctgattgtagaatcaatgaatttattccaaaagcatgcagaacactatgacagagccaaagaaatagcttattttaatgaacattcacattaaaaattctgtttccataaaggcagagcaatgtaaaaaaatgactttcatatgaggccttaagggtcagatagtttctgttttataggagattggaaagaaagcactgcaaatgaagctcctatttgttggatgggcttttctctcctaccaaggacaagaattttgaaggttcattttataaagttgtatggtggtgaatgccattgtttccacacaaacactcctttcccccataagacctcaaatgtttggttgtgcagggggatttaaaatcagagaacatgaagaaattaaaaatgaagcaattagttgtaggctttaacaattaacagaaaaaaaccaggggctagaaggcagtagcatatgagtttgagaaacactgctttacctcattctttctttcactgggcattagctagtcccacactcagcatagccttgattcagtcatttaacattttaaagtgcaagcttggtgcttgaataaataagcagctcctgggtagcgggaagagatggagactcaaagaggtcatctcagcatagtgtgggaggccatgctgcagcgaggggatgtgcaagcgctgtgggggcatagtgggaacagcctaaatcagactggaagttcaagatcaagagaagaatcacctccaagactagacctttgggttgtaactgctcccttgtgagtcttggagtcaaaacctcagatttctcaggccagcctttatttttacttttatttttgtgatagggtctcattctgtcacccaggatggagtgcagtggagtgatctagctcattgcaacctttgcctcccaggctcaagagattctcccacctcagcctcctgagtagttgggactacaggcacgtgccattatgcctaacttttgtatttttttgtacatatggggtttcattatgttgcccaggctggtctcaaactcctgagctcaagtgatccacatgcctcggtctcccaaagtgctgggggttatgggtgtgagccaccatgctaggccaaccttgatttctgatattttgttctatcagaacaacatgtttacgtgtacagaccctgtacagaaagaccgtgtctctgctccttggctcttccatctctttttatccttcccaactttttaaatggaaaatttcaagtatatataaaaatagaatagtataacatactgattaccccgtttcaacaacaattactaactcatgccaactttgttttatctattcttccatccatttctcctgtcccccagataatatttgtataagttagggttctctagagagacataaccaaaaggttgtgtgtgggatgtggagagggagatttaggaattggctcacacaattttcaggggctggcaagtctgaaatctgctggcctggagctggggacccagagggtagttgatgttgcaatcgcaaaaccaaaggcagttttgagggagaattcattcatcctagagaagacctcagtcttttaagaccttcaactgattgaatgactcctgcccctccagcctccattcaccagtatagagggtaatctgctttactcaaagtctactgatttaaatgttaataatatctaaaaatatattcactgtaacatctagactggtctttgaccaaaagctgagttatgttttaaccaaattgacacataaaattaaccatcacaattttgaagctaatccaacttatcacattatttgatccataatactttagtatatatctttataaaataaagattctttaaaaaatgtatatggaatactattaggacccatatgaaattaaacatcctgaattatttttgtttgaattaggatccagataaagcccatacattgcaattacagatatgactcagaagtctcttttgatctgtggatttgttctttatctcttttttgtttttctttgagttcatctgttgcagaaactattttgtcctgtagaattttgcatcatctggattttactgattgcattcccatgatataatttaaatgttcctttgtccctgtgtgtcccataaattagtaattatataaatagcttgcatcacacccaggctttttttttcctgcaaaaatacattgggtgtatcttgttgagttgtctctctttcagatgtcagcagcctttgattaacattgtttgactctattaatttattagggtatgtaaaattctaaattcgatcatttcttcttgcatttatgcattgaaatatttctgtaaagagtaatttgccctcattaattatttcattatagtttttcctaattatttatctcagcgtttcccaaattgggactgataaactcctggaaatgtgctgacatgttcttttgtgtgtgtctgcgtgagtgtatgtgtgtgtgtgtgtacatggtctgcaagctttctattataataatataactcagcatttttatctcaataatgattgagaaacattataagtatatctggatcacctagatgatcatctattgaagttaaatcaatgaactcagagctggagtttgcatttgtatttaggatcatgaggatagcaagcagcactgctttaattatcaagggttaaggaagaaagaagatgggcttaatatgccaagtcacttttcagtggctattagcttgaatagagaatcaactagagcaattgaattgctatcatgatggtagtaagcagcactgctttaattatcaagggttaaggaagagagaagatgggcttaatatgccaaataacttttcagtagttattggcttgaatagagaattgaatagagatttatgccccaatttggggcatacagtaattacatattctgtaccaaaaagatgatactttgtagctgtcagtaccataatgatgctggcgatttattttagcaaaaatcattttttgttatatttgagatgcattcgtttatttgatttttgctgggtttgtagttttgctgaatttgtaaatttgtttcatttttacagttgtccatgtaaatacttctactatttaagaaagtttataatagaagtgatttgggccaacatactgactctgaaagaataattttttccttttttgaagatcttcacattactcaagtttgagaagtgctgctttatcccattcttgctttcataggactattagcaagtctcacattcagcataatttgtcctgttaaggagtgatctctgctcagagtacttggagtcaaatggtgtgtgcctacagatcaacaccctggaacactcagagaaaaagagctgtatttatgaaaaggtattttggtgcctcctgctctccccgacatcatgttaaaccagagaacagaagcacttggctccttctgcatctttggctggttccttgtaaggcctgataactggagagtcttaggctgtacctacacattactgtaacaactttttggaaagataaaaaccagaacaaaagtcatctacagcaggcttttccggctttaatgtacttaacagatcatttaaaaatgcagattctgagctctgactctctcaggtgatgcggccggcccatatgccattcgttgagtaacctgagtctaaacaaccaactgctttgtctttatgccatgatcgttttattttcctaggataatacatagaaagctgtcagtacagtatttgatacagagccagcatttgataattgttcattgttcttgttatggttgttatagttgttacggtgagtttttgaggcatggagatgagtggaaatgatgaaagagaagatgggagtttagagattgacaggcctgaattaagatcccagctttgccatttgtaagctgtttgacctgggcaagtttttcagcctttctaagtctctctcttgtcaaatgttaaatggggagaaaaatagtacctcaaggaatcaagaggatgctatgcagctcctagagagatgggtatttgataaatgccatttttcttcctttgttcctttttggacatagacttggggctcagtcttggttctgtgacaacactattgtgagttgcattataatccctatgaaatgcagctctttctcattatctttaaagtggggataataattatgatgattaaattaatgggtgcatgtaaaatgtcttggtacataataggagcccagtcattactggcctctctctcccctcccttccttcacttagcgatgcagttggcgaggtcaaccaagcttaggcacagctttaagataggggacccatggtttcaatttcagttgactagaataatctggagatcttacaaaagaaaaaaaaaagattcccaggccttaccccaagagactctgatttaataggttctgggttgggatcagataccgtgcatattttttatggttctcccagatgttttgtataggcatccaggctgagaatcacggctctagtagacagctaagccttgatcactatcagatggctcttagcattcctcacgtctgcacagcacagcacaccacaccttttccacccccagctccagcctttctgattgtttcttcctacacactcctgtttttgtgcactcccatgagaatgctgcaactttgcccttcccttggcacactggggtgagcacttctggaacccatcacaaccaggcagggcaggggagcctgagctcagcatgcctcccagccccacccttcacactgagacacacagaaatccctttgggttcctgcctgaggaagaagacacccctctggagagctttgaggcatttgaaggagaaacaaacctatgacatgaggcagtgcctactgtgtggcaagaactttacttgtattatgtctgcttatcctttatgaggtagttttattgatattgtcattctcattttatagaagaaattgaggcaaagttaaataacatgcccaatgtcaagcgcacagtggtctttgtattagagtagtctgattctagaatctggggtcttaaaaaaatgacgcctgggtccactcagactaattgaaggagagtctctagagattgggccctatatactggtattttttatgagctgttcaagccaaatgtgagacctagacaacactttgctcttctgtctcccaggctgacttggaacctgagtctatagagattccttttattcctgttctcttcttcccctcttctgttggcgatttaaaaatttttttgttttcatgcttgttagagatcctcggtctgactgtcattcctaagagggttgtgataagctgaataatggccttcagagatgtccatattttattttctggaaacagataatatgttacctgatgcagccaaaaggattttgcagacatgattaaagttcaggatttggggctggagagattatcctggattattcaggtaggcccagtggttctcataaggagggaggcaggaggatcggactcagaagaaggagatgtggcaaaaggagaaggggtcagagtcagtgagagagatttgaagatgccatgctgctggctttgaagatggaggaagaggcctggaacccaggaacacaggaggtatctagaagctggaaaaggcaaggaaagggattctcccctgcagccccgagagggaacgtggccctgccagcaccttgattctccatctgtgagacccatttcagacttctgacctctagaactgtaagataataaacttgagttgtaattagtggtaatttgttagaccagcagtgggaaattaaaccaggggtatttggtgctgtagaaagtgcactgtcctccagcaccccagagaactggattccatttctgcactctaccattcactggctgtgaataattctggcaagccaccagatgtctttaagataagctgtttcttctgggaattagagccaagaaaccagatgtccttgagggcaggactgggctgatgacctcacacacctcacagatgcactccctgccatagccttgattcttctgctcagctcagctctgcacttcccaataggaaccactgttctcgctccctcaaactgagcctgagctctctatcatgttgtcctgggttattttaccactggctgaaattattttgtgtgttaacttgtcacaggcacttgctaaaatcaggaggcactatttccttggctgggcctttttttttttgagatggagtctcactctgtcacccaggctggagtacagtggtgcaatctcggttcactacaacgtccgcttcccgggttcaaaggattctcctgcctcagccttccgagtagctgggattacaggtaccatgcctggctaatttttgtatttttagtagagatggggtttcaccatgttggccaggctggttttgaatggctgggcctatttttttaagaaattaattaaaaattaacaatgaactataaatttcccaacaccaagagaccgagagaccagagttattctgttggcttttcccctccactccagtcaaaattgcacaatgttttgatatcacctcattggcttcagactctgcttttgtgatttatttgtttttcacaaacttctccctgccctacttccagtatttgagggtggacatggggcattatgtctaattggccagctctttcaaaaaggggagatattctagacctttgtatgactgtacctagtgcaaatataattggtagtgatgacatccaatcataagtccttggcctcatatatgcatatttaatactaagtctctttatccttagtagtaatattaaaccgcaaacttgagtgacttttgtgtgaaagttttctcatgggaattgtgcaaacttcattttttccaaatgatgttctgtttgttctattagttgctgtaccttatcttttgaaaaaagtgaacatgatcttggttgtacttagttggataaaatagttaacagctaagtttgttacattcttttttcctaagagaaaaggggaaaaaaagtcttgacgttaaggggatttcaccaaggttctcctagaacaatgtttcttaactagtgacaagagtgagaatttgccccccaggtgacatttatcaatatccatagatatttttggttgtcacatctagggggaaggtactgccagcatctcgtagttagaagccaaggaggctactaaacatcctacaatgcacagaacccctcaccctgcccctgcaccaaggaagtaaagaattatctgatcttagatgtcaatagtgccattgttgagaaattccatcctggatcagtgttgctcaaactttaatgtgcatatgagtcacttggggatctggttaaaaaagattctgatttgataggtctaggtggcccatgagagtctgtatttccaaccagctcccacttggtgtagccactgctggtgtgagtgccacaatttgagtttaaatgtcctagaattcttgtttcttatctgtcttcctacactaaaagataagttccatgagaacaaagaccttgtctatgtcctgtccgcaatggctagaactataactggcatatcatagttgtttaataaatatttgttgaaagcatgaatggatccatggaggaattaagaaatgaataaataagcagacaggcaggagcactgcttattctcacacgtacctctgaagaaccttagaggcacttattcttaaaaaaactgaatttcctctcaacaaagccagaaattcaccaacagctttgctcagggcatgacagtcttcctcaggttaaaaatggtctcctttctctgatgtctcacattgtccctttcgatgcagttccactggatagatggttgggctgataatagagggaaaaaccagaggcccaaaccctggccccacaccccagcctgtcccaaggtgaaaggcctagattcaatcatatttgtttgtattttggcagtagggggaaggaggaagtggggattttttttgagatggagttttgctgttgtcgcccaggccggagtgcaatggcacgatctcggctcactacaacttccgcctcccaggttcaagtgattctactgcctcagcctcctgagtagctgggattacgggcaccccacaaccatgcctggctaatttttgtatttttagtagagacggggtttcaccatgttggctaggttggtctcaaactcctgacctccggtgatccgtccagcttggcctcccaaagtgctgggattacaggcatgagccaccatgcctggccagaataggtttttaaaggaaaatgaggttagattgaatttcatggtgtaacctctgggggaaagacgtcttctagtgggcaacagggagctgaggggtggggagaaccggatgctggtatagtttgtacacctgtgagctttgggaactcagagatctattagcctcagttggcaaatcatttccttgtttttgctctctgggcctccattgattgcccttgtcttccaccttccgcacacaaggaaatccaaacaaagccattttggaatcctatctaggagtggctttccttcccaaggtggtccctgtgctcttgtagagaatttgctcagaacccaaaatacgctccagtgtcctcctgagaattggttgtgttgggcagaagacagaaaggagagagaagagcaggatgacaggaagaggagtaaagaagaggcaaagaaggcgaggccataagaacagggccacagggcattctctgtagattggcccaggagatagccaaacgttcacacaggtgtcattgtcacagagctcttgacaatagcaactctctcctttagaagctgtgatgcaagtgaatgtgtcagccctgctgattcaggtgtggtcactgcattttgactgtacattgttttgtaaacttgtcaggcccactgggtgcctgtgactgcgctgaaccaaagagaaactgagaaacagctttctcgtctgggttgggagccagtagagtaataccgggtttgggagtcctgcctttgaagcagttcatcaacactgaagaatgttctgcatctttcctgggacctataagggattcaagattgctataaggaaaggtcaatagagagtgagatttgtttgtcatcagaatgggttattaaagcacttggaggaatttacctttctggatgtcttcaaatagaaactagattcttgtattatgggatggtttaagggctctcagaggcagagagatgtatatccctatcatatcccatctttgctcaaaaatattctattgcttcttattgttcataggataaagtttaaatttctaaaactggcattcagggtcttctattatttggctctaaacctttcctaggtctttcttttttaaaagataagttaaacacaaaacaaaacaaacagaaagcagcaaactaggaatagagaactttctcaacttgatacagaatatctacacaaaacctacagccaacatcatactttagtggtgagaaactaggtgttttccccttaagactgggaacaacacaaaatgtcccgtgtcatcactcctatgccacatcctactggatgtcttagctaatgcagtaatatgataaaagggaataaaaagtatacagactgggaaggaagaaagaaaactctctttgttcacagatggcataattgttcatgtagaaaatcccaaacaatcaacaatagcagcaaaacccttcctggaactaagtgatttttagcaatgttttaggtgacaagattaatatataaaagttaacaaaaagatataaaattaaaaaaatataaaagtcaaatgctttcctatataccaacaatgaacaactggaattcaaaattaaaaatacaacatcatttacattagcaccgaaaaggaaaagatttagatataaatttaataaaatatatataagatctatatgaggaaaaccataaacctcttatgcaaaaaatcaaagatctaaataaatggagaaatattctattctgtttatgaacaggaaggctcaatattgttaagatgtcatttcttcccaactgatctatagattcaatgcaatcccagtcaaaatcccagcaagttactttgtggatattaaactgattctaaagtttatatggacagacaaaggacccagaatacgccaacatgatattgaaagagaagaacagaatcgtagtactgatactacctgacttcaaaacttattttaaagcttcagtgatcaagaaagtatggtgttggtgaaagaacagacacataggtgaatagaagagaatagatagcccagaaatttacccacataatacagtcagctgatctttgacaaaggggcaaaggcaattcagtagtgaaaaaataagtctttttaacagatggagctgaacaactgtatgcccacagtattagggttctccagagaaacagaacccaataggatatgtatatgtatatgtatatgtatatgtatatgtatatgtatatgtatatgtatatgtatacgtatacgtatacgtatacgtatatgtggggaaccattatgggaatggactcacacaattatggaggcctaagtctgaaggcctgataactggaaggcctgctggtataagcctcagtgtccaaagccctgaggaccaggagctcctatgtccaagggcaggagaagacggatgcctcagctcaagaagagacagtgaattcacccttattctacctttttgttctattcacgccctccatggattgaatgatgcccacccaggcaatcttctttacttagtctaccaattcaaatgccaatctcttctggaaatgccctctcagacacactcagaaatcatgttttacctgctgcctgtgcatttcttagcccagtcaaattgacacataaaattaaccaccaaatctacatgcagaaaaatgaatccagacatagaccttacctttttcataaacattaactcaaaatggattatatacctaaatgtaaaatgcaaaagtgtaaaacttctaaaagataacagaggaaaatctagttgctcttgggtgtggaaaagggttttaaaataatatatcaagaggacaatccatgaaagaaaaaatataaaagttagatttcattaaaatttaaaacttctgttttttcattctcttaatggtgtctttcaccattttgagttaatttttatggaaaaagaaaggtctatgtctagattcattgtttgaatattaatggtgaaagacaccatcaagagaatgaaaagacaaaccacagactggggaaaatgtttgcaaaacataaatctgataaaagacacatatctaaacaatataaatggctcttgaaacccaatgacatgaaaacaactcaattaaaaagtgatctgaacagacttcttatcaaagaaggcatacagatagcaaatgagcatattaaaagatgcccatcatcatatgtcatcagggaattgcaaattaaaacaacagtgagatactactatacacctatcaggaacgctaaaatccaaaatactgacaccacaaaatgttgatgagaatgcggagaaacaagaactctcattcattgctagtcggaatgcaacatggtacagctagtttggaagacagtttggcagtgtcttacaaagataacatacaattatctaggagcaccatacaattcagaattgtgctcctagtatttattcaaatgaattgataactaatgtccatacaaaaacctgcacataaatatgaatagcagctttattcacaattgtcaacgatgcacaaatatatccttccatatgtctttttggagaacaatttattttcttttgggtatatacccagtaatggaattgctgggtcaaatgttagttctaagttctttgggaaatctccaaatgctttccacaggaactgaactaatttacattcccaccagcagtgtacaagtgttcccttttctacaaagccttgccagcatctgttgtttatttgactttaataatagtccctctgactggtatgagatggtatctcattatggttttgatttggatatctctgatgattagtgatgtggaacattttttcatatgtctgttggccacttgtatgtcttcttttgagaagtgtctgttcatgtcttttgcccactttttaatggggttatttgttttttgctcattcgattgtttaagttccttgtagattctgggtgttagacctttgttgactgaatagtttgtgaaaattcgctcccattctataggttgcctgtttactctgttggtggtttattttgctctgcagaagatctttagtttaattaggtcccacttgttgatttttgtttttgtcgcaattgtttttggggacttagtcaaaaatcctttatgaaggccaatgtccagaatggtgcttcataggctttcttctaggattcttatagtttaaggtcttacatttaaatctttaatccatcttgagtcaattgttttctttttcttttcttttctttccttttttttttttttttttttctgagacagggtctcactcctgtcacccaggctggagtttgatggcacgatcatgactcactgccgcctcaccttcctgggatgaggtgatcctcccacttcagcttcctgtgtagctggtactataggcaagtgccaccatgcccagctaactttttatatttttagtagagacagggttttgccatgttgcctaggctggtcttgaactcctgggctcgagcagtctgcccacctaggcctcccaaagtggagttaatttttgtatgtagtgaaagctaggggtcaaggttcattcttctgcatatggctagccagctatcccagcacctttgttgaattgggagtcctttccccttttaagtcctttccccttagcttatttttgttgactttgtcaaagattagatgactgtacatgcatgttttatttctgtgttctctattttgttccatcggtctatgtgtctgtttttatactagcatatgctgttttggttactgtagtcttatagtaaagtttgaagttggtcagataatgtgatgtctctggctttgttctttttgcttaggattgctttggctatttgggttcttttttgattccatatgaatttcagaatattatttgctaattctgtaaaaaatgaccttggtagcttgataggaatagcattgaatctgtagattgctttgggaagtatggccattttaatgatattgattcttccaatctatgaacgtggaatgtttttccatttgtttatgtcatctatgatttcatagacatatgaatactagaaggatcgtagaagaaaacctaggaaacaccattctggatgttggctttgggaaaggatttatgactaagtacccaaaagaaattgcaacaaaaacaaaaatcaataagtggaacctaattaaactaaagatcttctgcagagcaaaataaactatcagcagagtaaacaggcaacccacagaatgggagcaaattttcacgaactattcagtcaacaaacatctccaaaaagacacatgcactcacacattcatcacagcaccattcacaatagcaaaaacatggaaccaagtgaggtgctcactggattggataaagaatttgtggtacatttacatcatggaatactatgcaaccataaaaaggaatgaaaatcatgttctttgcagcaacatggttgcagctggacccattatcctaggtgaattaacataggtacaataaatcaaataccacatgttgtcacttataagtgggagctaaacattggtaatacatgggcatacagatgacaataataggcattggggaccactagaggaggaagggagggaggggacaagagttgaaaaacttactgttgggtactatgcttagtacatgggtgatggaatcattcataccccaaacctcagcatgatgcactatacccaggtaacaaagctccacatgtatccactgaatcatatatccactaaaataaaaatggaaaaataaaaacagtacataaattgcatcaaagtttaccactgttttgcaatttgcatttctcactgaacctaatggtttcaaaattcattcctgtttgtaaatatagatatacttcttttattcaaaaatcttttactggtagtattatattctgttgtatatatattacatcatattatttattcatttctctattgatggatgttcagattatttccaactttatgttactacaaccagttgcagtaatgaactttttttgacatatacaagagagcatgtataggaattttgggagagtacacactacacatcgaattgctggattgtgtcatatgtgcattttcaactgtcctagctactgccaaattcttggcaaagtgtaatagtaatgccattttgcacttttagtagtgtatgagtgttcttgtttcctcatgccctcaccaacacttgatataatagattttttaaattttgcaataaaatagatgaaaaatacctgtttttaatttggttttctttgcttttagtgaatcaaggatcttttcatgtgattattggacaattagtgttttgccttgtgttgaattgtctattcttattttttacccttgggggagcagtttttctttttcaaattgattcctaattaaaaaattacattccctagtactcatcctttgtcatttatgtttatttcaaatatttttttctgtctgtcatgtatttgaaaactttatttatggtaccattgtgggagaggcatagggccaaggatgggtatgaatcccggttccgttacttatcaccagcacaaccttggatattttagttaatctctaactgtatttcagtttcttcatctgtaaaatgggggcgatagcattacctatttcagaggtttgttttgaagattaaaggagttaagatgaagagcacttacataaatgaaaagtggtacacagaaagcagtcaataactattagctaatatttggacatatagaagttttaagtggtttttttttttgctattatacaaggtagatttattttttttgcttttgtacatgataaaagtttgattccatctcacataaaataagatatgcagggatggagtggtggatccacagtcttcaggaataagcctcttttaggtgcactgctcctatcccctagatgtgagtcttatctgcataatctgggataattgccaaagcattaaccatcataaccatgttccagccttccagagaaggaagggcagaagtgatatttcttcccttcttttcaatcagctttactgaagtgtaatttacatgcaataaagttcacatcttttaagagtataatttgatgagtttgggcaaatgtatatggttgtctaattattgtcacgatcaatatatagaatatttccatcaccttgaaaagttccctaatgccctttgcagtcaattctattccctttacctggaggcaaccactgatctgctttctatcactacagttttctctatattagaatttcatataaatggaactatgcagtaagtaccctttagtgtctgttttgtttcatgtaacataatgcttttgagattaattcaggtttttgcatgtatcagtaatttgtccctttttattgtggagatgtatcatagtttgttcatccattcacatgtcaatgggttatttccaggtttgggttattataaataaagctactatgaggatccatgtacaagtctttgtgtggacatcgttttcatttctcttgggtaaatacctagtgaggattgctgggtcaaatggtaagtgtatgtttaatgttataaaaagtgacaagctgctttcccatggggctgttctatttgtgtttccacctgcagtgtataagagttctagctggtccacatccataccaacacttggaattgtcagtcttttaaaatttagccattctagtgagtgtgtattggtttttattattttaattagcatatcccaaatgactaatgatctcgaacatcttttcatgtttgccatttgtatacagaagttttaagttttgatgtggtcaacttcctcagtctttttcttcattgttttgctttttgtatcttgttaaaaatttttttcttatcccaaggacataaggatgtcttcaaatattttcttctaaaaagttttaaagttggaatttcataactaggtctttaatacacttagaatttatttttgaatctgatgtgagtagggaatctagttaaatttttatccatgaatagaaactcagttctaaaaacattaataatttttccatggattggtaatttatattgtcatttgtatcactcaccagcttctcatatgtgtatagtttctagctgtatttttcattatctcctaccccagtgactacaatgtctcctgcatgttccttccaatgtgagtttatttatgctcttccttatgtctagggtgactcctttttgttctacctttcgaaatccactcattgctcaaggtctagctcagatgacctttaaagttcttcccaaatccagtcatatgcctctgtccctcccttgaattaaatgaaggggctcagcacacgtatagcattttattcctctactataaatcttagcctatctttttggaatcacagtcacttctgtgtctgtcttctttgttctgccagactgtaagccctttcatgtttttgtggtaactgccagactgtaagccctttagtgtttttgtggtaggcagaacagtgttcctacctgcctatgtcctaattcctggaacttgtgaatatattaccttacttggcaaaagggactttgcatatgtgattaaattaatgacatacagtgaagagattatcctggattattctggtggactcagtctaatcacatgagttctcaaaattagaacctttaccagataaattcagagtcacaggaatccatggttaggaagtggtcagagatggaacattactggttttgaaaatggaaggaggggggctatgagccaaggaatggaggtggcttctaagagctggaaaagggaaagacatgtattctcccttacagcctcttcaatgggacatagcagcagcctaggtggcaccttggttttagggataggcatgtaggggcagctttgctgacaccttgatagcccagtgagatctgtgttgaatatctgacccatagaacggtaatataataaatgtgtgttgtttcaatgtactaattttgtagtagtttgttacagcagcaatagaaaactgatatatttgctcaccatagagtcccctgtaacttgaagcagatccttagatacaaagtgataaatcattgctcactgagttgaattgtgaagcaacatgtaccttggaactacagaatgaaaactttacgttcttactacatcattaatgatcagtgtgatgcttatcactagcatctagacctttgtcaatccatgacaaatgaatgacaaagaccagttttccttatcgttagcagtcctatgccctctgactttgactacagtggtggtaagtaaatactgttggctctgtgcaaagctttacctccttaacatgtgctggcagctcagtggtagaaaggaacagaaggagatgcctttttccctatgttatttaacctactcaaggtacttgactgagaccctttgatggggccattgaaaagtgttttctagtctttgttcttaggtaagggatttggagtcagacatacaaggactttgaaatcctggctctggtcttcgttaactctgtgacatagagtaggtcactaaataccttggagctttggttttcttatatctatggcagagataataatacagttgacccttgaacaatgcaggggttaggggtctggccaccccttgcagtaaaaaatccaagtatagatttttacttcccccaaacttgactggaagccttttataaacagccaattaacacatgtttcatatgttatgaaatgtagcttcattatatactgtattttttttcttttttttgagtcagagtcttgctctgttgcccaggctggagtgcagtggtacgatcttggctcactgcaacctccgccttccaggttcaagggattttcctgcctcagcctcctgagtagctgggattacaggtgtgtgtcatcacgctgggctaatttttgtatttttagtagagatggggtttcaacatgttggtcaggctggtctcaaactcctgacctcatgttctgcgtgcctcagcctcccaaagtgctgggattacaggtgtaagccactgcacctggcctatgtactgtattcttacaataaagtaagctagagaaaagaaaatgttatgaagaaaatcataaggaagataaaatatatttactattcattaagtggaagtggatcatcataaaggtcttcatccttatcatctttatgttgaataggctgaggaggaggaggaggaggaggaaaaggaggggttgatctttcttgctgacttgggggtggcagaggcagaagaaaacccatgtataagtgaaccaacccagttcaagcccatattgttcatgggtcaactgtatttccttgagttgttttaatgataaacagatgtatgtatgtaaagttattagtatacaataggtgttcaatgagtgccttccttcccatcacaggtgcatcactactgacaaacaatccagacttctatttactttgaagagttagttacaagcaggtgatgccatatgacatttgttcttagtttttgtttttgtgttttatttttaaagacataagtttttggattgcctcatcctttcttatatttccaagtttagggttcttgtcattttagatgtttggttaagaatagctgatgttccgtggatggttttagttatttaaacattgagaggggttggtagtgggaacaataggcagaggtacaggagagatcaaaataagataaaataaataaggtaatagcactctagagtggttattttcttctgacagagctttattatcattctggctttgggagcagctgctgagacactcatctctggtcacatgctaagcctaatatgaatgaacacatccgggcttatgacactgacaagagacaaatggcctctggagtacagagatggggaagttggatttaaatctcagtatcttgatgctactctgtttgtctccacatgctcattcaaatagcattcctgtgtcttggcactatcatctgcaaaaagaagagacactcatcctcttatttggaaggctgggcttgctaagctgagagtgaacgagaagctctcttgcagaccagagctctcacttctttcttgatttcacctaactgctttccactgttgagaagcttcctttccactgtcccctggtcactgcgggctcctcctctacagcactactttagaacgatctcctccatcaggcaccttcttagacaaagtcctctccccgtcttacacatgccagtcatcttaacacctccatagaacttgtaattagtttgttccttagggacatattttagcatttctgttttttgtggtttgttcagtctatcataagctttctgttgtgagcaggggctgtgtctattctgcagtgggtgcctcaagcgcctgaagtgtccctgtacaatgcaagtgatgattagaagagcatcccaaatgctttgcgctgcactgttgacctacagcagttttctttcatcatttttcttattcctataacttcggttttggccatgacttcaaccctgtggcgatctctttcttgaggcactgtgtgttagaaaatgggttatctttggccgggcatgctggctcatgcctgtaatcccagcactttgggaggccaaggtgggcggatcacctgaggtcaggagttcgagaccagcctggccaacatggtaaaaccccatgtctactaaaaatacaaaaattagctggtatggtggcatgcgcctgtaataccagctactcaggaggctgaggcaggagaatcacttcaacccgggaggtggaggttgcagtgagctgagattgccccactgcactccagcctgggcaacagagtgagatcctgtctcaaaaaaaaacaaaaaaacaaaaaaacaaacaaaaaaaccaccaaaaccaaacaaacaaaaacaaccaaaacgaaaatggattatcttcttatgccttacagaacacgatctattatgttactgctgctctaaccattccctttgtcttctgtctgtctccatggcctgcaagagtggcaatatccttcactggccttggttctcagagcaggtggcacatgactgaggctagtggcctggtaggtgggatggcaaggtgagtcacatccagaactgccctctggcacaatgtttggacagggaggctggaggttccaaagggtgtgttctctgggtttaaatgcattggaacctagtctgaaggtttacctgctcatgctagaaagataggagcacattggtttaatctcaaaggaggaagagtgggcagttttagatttagggccactcagcatctgcttttccctcttgagtctagagccattataaatccttaagagtgtgatattccccttcctgtgtccatgtgatctcattgttcaattcccacctatgagtgagaatatgcggtgtttggttttttgttcttgcgatagtttactgagaatgatggtttccagtttcatccatgtccctacaaaggacatgaactcatcattttttatggctgcatagtattccatggtgtatatgtgccacattttcttaatccagtctatcgttgttggacatttgggttggttccaagtctttgctattgtgaataatgccacaataaacacactctggggactgtggtggggtggggggaggggggagggatagcattgggagatatacctaatgctagatgacgagttagtgggtgcagcgcaccagcatggcacatgtatacatatgtaactaacctgcacaatgtgcacatgtaccctaaaacttaaagcataataaaaaaaaaaaagaaaaaaaaataaatccttaatagaagagaattgagttggacttgacattgaggaaagtgtgaaggtaaggatactttaagaagactcattcaaaaccaatgaaatttgcaggagaaagtgctggtacagaatgatggagaatgaaattttaaagctacatatttttgtatccacatagtatgtggatacaatttgagtattaagacaaacagagcaaagctgttcagatttgtttagtgtattggaatttacaaatgtattttgaagtatgagtcactaatgaagacttaggaatacttcattttggtggtggcgcaagatgaaattttaagttttttctcataatggtattcattttatattgaatttagctattcgattagaattccaccaagcaaaccattgcatctctttttctgggttattgtgagttgttttccctttctgtgtatagacctagtctgtggtttgtgtggctgttaacatctgggaattaacacctagcacctgagttagatcttgggctctgcccaatattatctcttaagggatagagttttaaaatgtttcccttctgcatggtgagtgagtctgtgtttacgccggggggtgttcagcaaaaagtagggtaatggggataccaggaggggtttctggttttcaggccagagggtaatgcttggtatcattagaagtggagggcttctttggatgggggaggaggaagaatttttaggatgaatcacactggaaaccaatgatgaaatctttcagtccgtctttttaggcctgggtgaactgctttttttttttttttttttttgagacggagtctccctctgtcgcccaggctggagtgcagtggcgggatctcggctgactgcaagctccgcctcccgggttcacgccattctcctgcctcagcctccctagtagctgggactacaggtgcccaccaccacacccagagacttttctgtatttttagtggagacggggtttcgccgtgtcagccaggatggtctcgatctcctgacctcgtgatccgcctgtgttggcctcccaaagtgctgggattacaggcttgagccactgcgcccggccgaactgcttttcttaggaggttgtaagtggtaggatcaggtaggagggtacggaggaaggaccttcatgtttcctgccctggcattttccctggggttgctgctggctgcttgcatgttctctttggtgggcgaggaaagccccgtggtctccttcaaacgagaatgtctgcttttgtgtttaaatctgatcaaactctgtgctactttacttggcttttacaaggagtaagttgcacctgaaggcaacagtaaagcagggaacaagagatttacagataattgtttctaggagatgagagtgaagtaacgtttgaggatatggacaatgttttctttcacaatgaaaatgaaataagatgaatgatgtttttattgccaggagtaactgtatctgttgggttccttagccagacaaatgttaacaacccttatactttgacttcattttgtttggatctttaaacagaaagattggaaccatcagattgtttcagattaaaaggctgaagacacaggagttgtataactgaagtaggaaggaggactcctttctttccccactttgatcagctcatattcttcttcacaaaccctccactattccccattgcctccttattacatcctgatggatgtgctgagatatactgatcctctcagctttgggggcagcaggagcctcttagcttgtcataggggtgggtcaggagggctatttggcctagagctgtacattcagggaaggcctggattttaaaatttcatcatatctatgacataggcaatatgtttgcttgtatgtttaaagtatttattaggtaattctaaatatttaaaagcaaccaaaatttttgtgactctgttttggcattttctttcttttttaatatactaacagccttaaaaaaaaagtggagaaggcccaggcatttaacctctgaggtgcccccatagtcagttgcacaggctttcataatatggtaatggtcatagaggctattgaggaggacagaccttcaataactaatcatgcaaagaagtcactaatgtgaggactgggtgccttgaaagggtgtaatagggaccctcccctatttgggccatcaggaaggatttctccaagcaggtgatctcctacccctagaggggatcaatgttagacaacagaggtgataaatctcaattaccaattgttttttaaggaaagagccaaactctaggatgatgttcatattttgggtttgggcaaaggggtgaattggcagtgttgttaaccaaactaggtaaccagggattcttttaggataactaaaattattttctggcagtaggtgggttgataagatgattagttcagttttggggtattttgagtgtgagtggcctttgagacatcagagtagagatgttttgcaaatatatgatcttgtgttatgagaagagcttagtaactccttgtaaatttagaacctcatagtatgtaaggcagtggatagccagtggggaatagaaagaagaatggatatatggcctctgctttcaaggagtttattctctaattgcagtcaaggagttcaataaccacagattatcccagtaaccctctaagacaacagcaagagaagtgtcttgggcactacatcaatgattgccaaatgaattgtatcaatgtttcttgattttctatatccatcttagtatctaagtaaaattgttcatttggttttacttttgttttactctggtagttagaggtaggttgaagatagcatgagcttatttaacagtactgtgggttatttgctttggagtaattcattttaaatttatgatgtaggtactgttatttgtcccattttacagaagagaaaactgcggcactgaggggttaagtaacttgcccaaagttatgtaactaacaaattataaagttggtattcggacttagataatccaaattcaaagccccttcccctaatttttaatcctatttttttaactaaatatgttccctatcatttaagttatttgaaaaccttattttcagtggctgcgtaatttatttgacattctcctagtgcttgtatttccatttatatttgcaagataaatccctgcaagtgggcttcctgtactaagaaatataaaatgtttaagacttcttaaaccaaatacaacccattttcagaaaagttcaaaaaatttgcagtctgtatatacttttcaatcccatatagaagttttctcgatcccatatgattgcctaaaccaaaacagaactcagcaacactgtgataaaggtggtggttaagataataaatcaaagacttttagggcaggaaagaactccaggtttcatctaggcttgcctccttcttttattaattaagatccaaggcttagaaaggttaagaaacatgacgcaaacacaccattacaggtatagttaggacaaggacctgcacatagcactatgtgatatattgagtctgagactcttggatggtttggacgattcaatggtgtcctgaaatgactgcctggggtcaccactgagatataagagacttttagtgtttgggtcagcttccaggtttccccctgagtttcacagttgtatcagagggatggaagtaactcaaaagggtctgtcctgaactgagcagcccattatcacctagagataaaataaatctgctgggccaggggaaatcctgaaatctcctttcatgagtttccttggacctggcctagtgtcagatccacaagggtgattctggactctcttttcattattctgttgatggtatgatatgtttcaacaaagggctactcacgtaattaaaaactcacataattcttttttttttttttaatagcagggaccaaaaatggagggtattactgtttattaaccagaagtgactccactatgtggcaataatgtaaacaaagtttgcaatttgatttggcttgatatctggctaggtggggctaaggtgttttaacagtaaatctcaaagtttcattgccttagcacaataagggattgtttcttacaaaatctgaagcaggctggttgatcaccttctgggttgcagatatgccacaccaaggttgcccaggcaagataagagagaggtaaaggagttgtgtagactgctaactgaccctgcttggaaagtgacatgtgctagttcaacttatagtgtattagccagaactaaaaacatgggcccaatctaactggagggagaggctgggaaagagtggggagcagcacacagatatttgatgaacactaattgtttcttccatacacttgatgcttgatattttgaaattatcaacctaaaagaatgtgtaggcaatttcacatcatttcaagttttaaacataaagataaaactttcatatcactttccttcagataggcctgaagggccactgtatggcgaagtatatactgtggatgtgaagaaatccttttcatttctgtgttaaaaataatggaacttttgcttaatatttgtgagatttgggcaagtggtctaacctctctaaatgaggatccctaaagaaaaaggggtaacagtgcttcattcatgggtatgttgcataaattaggttgaagactgaacataaaacacttgacacagtgcagagtacatggtaagtattcaacaaatgtgagtttttattttgtttttattggtattatgatattgtactggtatttactagtatgcacagtaatgtaggatcctcagaatcatcctcagtgatgtatccataataatcagaagacagtgtactttatggaaacaagtgatgttttgtccagattctggcaatgaaatgtcttttactttctgtgtgttcttatatttgtagatcatggggaatttcagaggtcatgccctccctggaaccttcttttttattattggtctttggtggtgtacaaagagtattctgaagtatatctgcaaaaagcaaaagcgaacctgctatcttggttccaaaacattattctatcgattggaaattttggagggaattacaatagttggcatggctttaactggtgagtggaccattctgtgttctatttttaccttttaggtgttttcattcttttaaagaattggttggagcttctgaaataattttatatcaattgttctgatctctgaaagaataaaccctatcaaaaaccattttgcaaatgatatgaaattaatcaagttattatggaaaagcttcagtaataaataatttctgataggctgtagaagactttagccttctgcactcatctttttttcttggttcctaaattggagaaagagattaggccagatgacttctaaggcctttccactgaatcttccatatgaagattcaatgaaaatgttctgtgttcttgagagttccactctagcctctccattataaaagataaaatttccagttttcccattagatttcttcatgctttattcatggcaacaggtctttgctatggcatcaaattacacagtaacatttccaaagagggaaatttccttgccaaattctatagattaacaaataaggcagtatctgtaggaaagtttaactgtttgcataccagactagatcgtctgctgtatctgtctgggctttcttttttccttttttcttttgagatggagtctcggtctattggccaggctggagtgcagtggcattatcttggctcactgcaacctctgcctctggggttcaagcagttgtgcctcagctcccaagtagctaggattacaagcacctaccaccacacccggctaatttttgtatgtttagtagagatggggttccaccatgttggccaggctggttgcgaactcctgacctccagtgatctgcctgcctcggcctcccgaagtgttgggattataggtgtgagccactgtgcccagtcctgtctgggctttctcagttatcataattggagaaaagctgaactctttagcatttttatctggtaccaagcacaatcccctattttatggcagctacccaaagatgtagtatttaagaaggaagtaatctatctccataggagttgtctcccaaattcaaatctccaaataattcaggatgtatctcagtcattagattggaataggcagtggaactaagatcattggcattgaagatctgaaatagctgtttgattcaattggctatctttgactaaaactatttatttgaaccagcatctgaacctccaaaagaagcctaaagtgccagtgctcagctgttagggaacagctcagagagaagaattaatgtcaaaagaggacattagattggaataagcaatggactagtcctcctgcatcttcttgaattctatgtaaagcagagttgctaaaactgtgatatgtttcttggcaggcatggctggggagcagtttattcctggagggccccatctgatgttatatgactataaacaaggtcactggaatcaactcctgggctggcatcatttcaccatgtatttcttctttgggctgttgggtgtggcagatatcttatgtttcaccatcagttcacttcctgtgtccttaaccaagttaatgttgtcaaatgccttatttgtggagggtaagtgttagtgagtattttcatgtacctttctctattagtgagcatttatgtagcccttcatattaatatacctctggcatcttgttgcagccttgattgataggaccatatatctgggccataatgaaatatttgggtgtcctaggcagggcgccaaaaatctacatgctgtactgactcatttagtagaactgggtaaacacaattgttcaattgctatgttcacatttcacatctgtctcaaaggaccacttacaaaggttactcatctctgggttgttctgaagattatcattttttttcacttttaacaaacgaaaactgatcccagaataataaagcatgaatacactaaaatgaggcagccactcacagtggaacagcttccactatctactaacaggctttttcatattgatacagtaatactctgccatttgatgataagtagggtccaaaaaatgcagtcacataaaaaatatggggtcctaattttggaaagttaattaaaaacaatattttttgttcagctggtctcccagttactgtagggaggaaaaaagaaaacaagcatttaatggttttttttttttcatgtattacacacgtaaaaaatagattgattatggaaatagataaccacaaattgatcaggaggcagtcacttcctactcaccttgcctctggcatccaaagatgagaacttttgcccatacctcgggaacaagggctggataaaagatggatgtcaacaactaatagcccggttctcattatctcagggggttaccgtatttttgtatcaatcttttctctttgtcttcatgaaaaagatgaagctggaatctgtctacaggatgaagaaatgcagttatttactacttcttgggagcttccagagcatgttgttatatctgtcaaaatccacccgtatgtgtttgcttcctccagtggactgaattccttaaggcgatgctttgacttattcatctgtgtgctcatctgaattattgcacttgccatgcttactgttgtttgtcctgcttagaagatgctttgaaatattttcatcttatggagattccaacttcgtcttaatccttttcatttagataaagaggaaaagatattcattcaaaaatacagttaacaccctgagataatgagaatccattcattgaaaatgtcacaatgtgttagagagagaataaaggtcagggaaagcaaaaagagggttcaatttcaaagatcctattctaatgaggtggtgatgtctccaaaaatgcagtactgtgggaatcagtgggcgcctgctcttttggacaaatgtgtgtatgtgtaaaattctgtctacggagagagggagagagagaaacagtgggtggtccttggttccactgaaaaagacaatctgttttttccccatcagcctttatcttctacaaccacactcatggccgggaaatgctggacatctttgtgcaccagctgctggttttggtcgtctttctgacaggcctcgttgccttcctagagttccttgttcggaacaatgtacttctggagctattgcggtcaagtctcattctgcttcaggggagctggttctttcaggtgagttggggcctctagttaatgtacctggactctttgcctgtaacttctctgtttatttgatgaggcagtttgctcccggagacttccctccaacatactgcctgtagtaagatcatgggcctctgagaagtgatgtttctttgagtgtcccaatagccctgatgggagaattgtcagagcagctgggaagtggtgcgtgcacatcttcatcacacctggacatccattatgtaggaactctgagccgatgcttttagttagaagcagcttctgacactaaagcagcttatagcataataagcttaagaaatatatagaaggcagaaaagagagcaaactgttatttattgagaaataactatgtgttggctactgtaccaaacttttatatatacattgttttattttttccttgcaacagcctggaattcaggcattatcatcatcaatttacagataggaagactcagagagaccaagtctcatacaataacagagctaggatctaaatttggattcatctgacccgaggccgcaggctttttccattttaagctgttaactctttaaccttgatgaattgttgaaaacatgaattccaatcagtaaacacacactttatagagactgatgaatcataatccaacatgcatacatatctgtaaacaaagtctaggatggaaggtgaattttggtttaatcagggaagacttcttagaagagatttttagtcaccagagaacacagatttgggataatgaggttattttagagatttgtattgcacatgaggagtgataaaaagcattggtaggtgagggggagagaaacatcatggtcaaatgggatagaaaagatgcaatatttaagcatgtaagaaagcggaaaggctgttggagcaaaggctagtaaagaggggctagatccaagggttattttaatggaaaaacttcatagaaaaaagctaacaaatactctataatgtgataaagctgataattggtgaatttaattatataaaatattatataaaatctatatctcttgcttggaatgttttactatatacacgtattcctattcaaaaataaaaatagacggaaaacattttaaaagagatgacttctggttaagatgacttctggtcaagatgacacagtttatctccagtgtatcttgtgtgctcctgacacatagcaatgacagataaaataaaataaaataaaataaaaacctagaaaattggaaataaattttcaaaaataaatttaaacaataaagtagaaaacactaactgcaatgaagcaaaacaaacaaaaacaggccaaagaaacttgtgggctggatgtagaacagaaatgtagagcaagagtcgagctgagcctgcaggcccagagcagacggtgatggttggttttttggctccagtggaactaaaagaaagtaaaaggactcctttcaaggtggaggatgaaaccaggcttttgggactctttgattgtgtttttttatatattctatattcctaatggtttttcatctgattgatctctcactttctaatagaagtctgttgaagttttatattacaggtctggatttgtccatttcttcttatgttcattttttgctttgttgtaaggctgttttctgcttctctctctctctctttttttttttttgagttagatgctgatctcatttattttcagtctttcttgttttaaaataaatgcatttaaacaaatacatttgtctgcacactgctagagctgccttctgtaagatttgatgtgttagtttgtagtttttttgatgtgttgatgtagttttcactgttgggtaattttgaatgttatttccatgtgcttctctctttaatttatgagttatttaggagtacacttttaagtttccaaaaatattctttttttcttattatttatttctaatgtaattgttttacggtcagggaatgtattctctttgtaatgtgttgagacttcctttggaatacggcccagtgtcagtggttgtaaatgatccatgtagtcaaaggaaagtatatcctctgtttggtttaggagtcctcatatatttactagatcaagtttgttaaaaagcgaaatattcaaataaagaaaggcaggacaagaggggaaaccccaagagagcggaattataaacataagagcagaattaatgaaattaattagtgttcagttaataatgactaattaatgtctaggatctgaaggaggaagctgtgggttatacctcaactgggaataggttggcttagtgttgccccttttggcagataaatgttttcatatttcccccaaaagcttttctaaggaagagattaatgtctttgggcataaatccgtgattatttagaaaatttttcatctaccaatatgtctagactagactgtttccttcttcctggtggtcagcctaaataatgtccgcagctttaaagaaaaatgaacatttaataccagcgcaaacacacacactggcaggaaatgaaggtttagccatagtgacattcccactactgcacccctctgaaacaaaactgtctagaaacttaggtgaatatattatgcttccagtcggtaagtgtggcatatgaatgtttacagcaaaacgctgtcttaagctaacaatattatgtcgtgacttgcttttcaccatattaccatatttttttctcactacttctccataaatggttaatatgttaatacttgtgcatgaactgtgtatagagggattagataaaacatccacctagactcttggaaccgtaagtatggagatgtgaattgaaggaaaccaatactcagattggccacttttttatcacacacatataaatgattgggtaatacgtaaatggagagggaatttcccttccaacttattagcaatgctttctttcctgaaccacatcacagtcaaaaatgctttctcaataacctagccacatcatgcaatttaaaaaagaaaaaaaaatcctgcaagcccctttatactatgaatcatgttttccctgtgtctctgtgtgggagaatatttcaaaagctccctttgcaacttctcattcccaagctccctccagtcatcctcaccgcccaggtgcagggacaatcagggaatgaggaaggtgctcctgctgtctttgcttcttgttttttaggacagttgcttccactgcatctcccagctccactagtccccccagagattcctcccatcactgcacagatcctgagcccaaacgaaagctcagcctttgttttgcctttatgaaggacgaaagttcatttttaaatgacaaaaaggcccaactaagcagtaatggtttgaggtctgatgcggcagcagatcaaacatttgcttaggcttttagtgttgaaataaatgattggataatcagataacaacaggaaattcagacttcgttataggaaattggccccaggcttattgcctattagagaagataattatttaaatttgaaatgtgatactaatgaagcttaaactagtcgaaaccagatgttcaggaatggcatacaagttacagcaagaaaaactttttttttttgcagattgaggtttttttttggaattttatataaggaaataaattaagacgacaaataaaagtgtggtttctgtatttaaaggaggatttaatgagttgtggcagtttctagccttagtttgggctttcagctttcctaatttattcgtgtttggcctagaatgactatggaatgtttctatggctttcactgtagtcacatcagttaactctgttcagtggcctcagtcaaatctttagctttcagcattaggctctggggctgctaaagagattggcgacgggaggggctccaagtttctcttctcctgatgtaaacagcaaaaagtttggtagaattaatgatgcctaatggaggtgacttgagattttattttggaggcttcaaaaagcaattatgaatgtggcatgcagtgacaagtccctgggcctgcagtttagaccaacctgaatctgtatgctagctttaccacactaactatatgaatcaccatagataatatgttctgtgccattaggcttactaccccaactgtaaaatagaaatattaataatatctcatggggttattgggaaaaatatatgctataacttgacaatgcatgctgtcctggggagagggctgctaatttcagaggaaggggagcagaggaagcttccagaagaaggtgaaagatggaagagagtcaccaatgtgtctaggcttaaggtttagggcaagtgatacccttttgcttattttgaactcaactgttgtattagtttcctagggctgtagtaacagatccctacaaattgggtgacttacaagagaaatttattcttttactcttctggagaccagaaatctgaaatcaaggtgttggcagggttggttttttcttggggtccagagggagaatctgtcccatgctgatctcctagccaactgccagccatccttggcattccttggcttgtggcagcaagacttcattctctgcctttattatcacaagatattcttcctgtatttctttgttttcctatgtcttcacatggccttcttataaggatgccagtctttgggtttagagccaactctaatccagtatgacttcaccttaacttgattacctctgcaaatactctgtttccaaatacaatcacattcagagatactgggagttaggatttcagcatattggcagacacaatttaacccactacaaatgctaactcttatctctgggagctgaagcagatcacttcccagatcgcaggtcatgtggatggcattggaggaatgttggcaggactgatggatgggatctggagggctagtccacagctctaaacactcatcttccctaaaattctcctttctacacagaatttttctgtcaatttccatgaatttgttgtaagaggaaggcatgagaccccagcttagataactgggcctttgaactgggagttgactatgtgactcaattttctctcttgttattccaaacagtgaacatagaggacctagaaattcttgccttcttccgggggcttcagggacctgggctctggtcactttggctcccacagtgagctttcctagcagtatataaaaggggtattgcaaaacactgatatctccaaagcaacagtctaaccagcagggtggcattttccacctgcagtttctgagtattgtgagctcatacctctaacttaatgactgatgtatcttcttccacagatgttgacacatcttgcctttagaatatatccatgttctaatgcagaggccccagcccttggtgggtgaggcacagcggcagtgatgcaaatgtttttgcagctgtttggggatggagaggcaagggtgtgcattacttaattttcctgtttctaaaatagacaataactgtattctgtgtcctaggatataaagaagggaaagaggaagttattgtaaagtaccttgctaatttcaactaataaggtattttgggaaaatgtatgactctgacattggttgacaaataaaatgcattgggccaggacaaaaatagaaaaccttggttggatcactccacttggtcaggaaggtaaactgaatgatgaatcaatggagactgcatgcttccactcatgtttgccatttaggaatacaggcctaatgttgccagatagttctatttttacaaaaaagctgaaaatgcaaacttttgtgtaatgtttcctaattttttaagtgttggcaactaaagcaaattattattattgttttttttttttttcctttgagacagagtctcactctgtggcccaggctgtgggccaggagtgcagtggcacaatctcagctcactgccacctccacctcccgggttcaagcgattctcctgcctcagtctcccaagagctgggattataggcacatgccaccaggcctagctaattttttgtgttcttagtagagatggggtttcaccatgttgcccaggctggtctcaaactcttgacttcagctgatccacctgccttggcctcccaaagtgctgggattacaggcgtgagccaccacacctggccgcaaattattgttttaaatgtgcaggccagacaaagcatgtctgggaattagagatgtggctcaagggcaacagtctgtcatctggttttaatggtaatatagtgccatgtcctcgtgggaccaccttccatctcagtactgattattcaaaccatatcagaactgctgagatgtctcaaactgatcttgttatccaggtcactgtccttcgtattgccccatatggaaaggctgtatggtgaaaagagtatgggtgggagaaagaacatggagtttttggagccagaaactactggtctggatccctaccatagtcgttcagccattttgtaatactaggggaagttgttgaagtccttgagttccaatcttttcctacgacatacgaggatgacgatgtcttcttcttgaggttgtttcaagggctaagaattattgtgatgtttatgtacatgagtgaggattaccgtttatgtacatgagtgaggattacgtgacaagcacgtggtggtaccgccatctgtcagacagtagaaatggaagttttctttccaattaaagggaatcctgaaatgggaacaagtgattaaggcacaaatcttagttttccccgacttactctaattatttgaaatttcaaacagaaatggaattaatgttttattcaatattgcacatgaagtgtttttttttcttgtaacctttcatttattagacgtgtaatcatgggcaaatcactaaatcacccgattttattatcgagataataaggataataatacattaaaatgagggtaataatacatccttgaaaagggccattgcaaggagacacctaaacactgtaactgacacatagccaatacatggtagacatttgtaggattattcattatattatcctggttttgaatttcatttagttccagaaacctgcaatacattcatccagttatctattatctctctatctacttattgtttattgggataaaactttcctaacataacattaatatttttaaagtgtacaatttagtggcatttagtatattcacaatgttgtgcccccatcagctctatctgttccaaaacattttcatcaccccgaaaggaaaccttgggcccataaaatagtcactctcccgtctctcctcctagcccccggtaccactggtctgctttctgtctctatgaatatttgtctagtctagatattttatgtaatcagaatcataatatatgtgaacttttgtgtctggcttcttttacttagtataaatgttttcaagtttcatccatgttgttgcatgtacttcattccttttatggtcgattgatagtcccttgtatgagtatactgcattttgcttatccatatcagtttttgaatatttgggttgttttcatcttttgactattattaatagttctactatgaacactcatgtacaagttttgtttgaatacctatttttagttcttttgggtagaagtgaaattgccaggtcatatggaattctatatttaacttcctgaggaattgcaaaacggttgccacagtagctgcagaattttatcccaataaaaaattagatagatagataaatggatgaatgtatttcaggtttctagaactaaatgaaattcaaaaccaagataatatcatggatactcctacaaatgtctaccatttattggctatgtgtcagttacagtgcttaggcctttccttgcaatggccctttttgaggatatattattatcctcattttcatgtattattatcttcattatccagataatcaagattatccattttacattcccatcagcaatatataaggatttcaatttctccatatcctcaccaatatttgttatttttattgttattattgccagcctaatgaataaaaaatggtatctcattgtggttttgatttgcattcccctgatgaacaatgatatccataatcttttcatgtgcttattgaccatttgtatatttgctttggggaaatgtttcttgaagtcctttgcccattaaaattttttgttgttgttaagttttaggaattctttttatattctagatataatctcatcggatatatgatttgcaaatattttctctcatgctgtgagttgtcttttcattttcttaatagtgtcctttgaagcacaaaagttaattttgatgaagtccaatttatctgttttcttctttggttgatggtgcttttggtgtcgtagcttaaaaaaaatcaacaaatttcaagtgatgaagatttctccctattttcttttaggaattttgtggttttagctctcatatttaggtctttaatccattttgagttcattttatatatatataattttatacatgagttaattttatatatgaggtaggggtccaaattcattttttttcatgtgaatacccggttatctcagcaccatttgttgaagactgttctttccccattgaatggctttggcacccttgtcaaaaaccaattgacctcagacatatgagtttatttctggactctcaattttatttcattgatctaaatgtttatcattatgccagtatcacactgttgttttgattactgtagctctgtagtattgaagtcctccagctttcttttttaaggttgttttggttattctggatcccttgcaattccatatgagttacaggatcagcttttaccatttctgcaaaaaaaaaaaaaaaaaaaaaaagaacattggaattttgatggcaattgcattgaatctgtagattgctttgggtggtattgccagctcaacagtattaagcttccagtctatgactatgagatagctttccatttatttagatctttgatttctttcaacaatgttatgcagattttggtgtacaagtcttaaacctccttgattaaatttattcttaaagtattttattctttttaatgctattgtagatggaactgtcttctttttctttttcttttttttgagacggagacttgctctgtcgcccaggctggagagcagtggcacaatctcggctcactgcaagctccgcctcctgggttcacgccattctcctgcctcagcctcccgagtagctgggactacaggtgcctgccaccatgcctggctaatttttttgtatgtttagtagagatggggtttcaccgtgttagccaggatggtctcgatctcctgacctcatgatccacccacctcggcctcccaaagtgctgagattacaggcgtgagccaccacgcctggccagaactgttttcttaattttatttttgagttcattgcttttgtacagaaatacaactgttttgtatattgattttgtatcctgctattatgctgaactcatttattagccctaatagttttctaatggatttttaaaggaatttctatatataagatcatgtcatctgtgaatgtagatatttttgcctctttctttccagtatggatgccttttatttttcttaacggcttaattactctagctaaatcttaacttaattgctctagctaagattttcagtacaacattcaatagaagtgtgaaagcagacatccatgtctcgttcctgatattagggggaaagatttcagtcttttaccattaaatataatgttaactgtgggcatttatttattttaaaacctttttgtactccaattttgaaataacagagtgaaactgcacaatgtagaaacccaagacattctcttaaagtccagacattcctagcaagatgactgtttatattttgaaaactgatcattaaatgtccttttaaaacttttatgaaaatatgacatattagagactctctatattactaaaacaggcagcaaaacctgatgttttatctgttacatcttagataattggagttaacttagttatttacctcggaagcaagtattttgaaatgtaccatttttgggaatgtgattggttattttaatatatgctttttgttctaaattacagattggatttgtcctgtatccccccagtggaggtcctgcatgggatctgatggatcatgaaaatattttgtttctcaccatatgcttttgttggcattatgcagtaaccattgtcatcgttggaatgaattatgctttcattacctggtaagttagcgatttctgttaatggaagttctgttccttggtatgtgattatcaagactcagtggtattgaatttaaaattcaaaagggtatttcattccttatcatcccataagacagggtagcatagcagaacattatctgcaaacacaaaaattcccagtaaaaagaataaatgctggtttaaagttagtcactcaacagtgcctcagctgtgcctctgatgctcacatttcccttcatcacactcctctgtgcctccatgtctccacatatgctatttcctcttctctcttctgaatggtttccctcaccctgcactgcctatagtgagtcctccatttacccatgtgtagatacttcaattatagcacttcttaagcttcgagtccttttttgaccaacttgtgtgtgttccattaaatgtaggtgtctgcctaatttgacattgactaatatttctaaaagtcagatccagttgaatacattttttataagaaccccagtataatgttccataggtgggtaaggagcagtagaacagagttataagaacacatatttttagctgcactatttatcagcagtatgactttgggccaattacttaaccacattaagtactagttttgttgtttgtaaaatggggaaataataagacctaaatgagatcaagtatttaagcttaggacataataagagctcaataaatattattgtcttgttgttcttcctcttgttattcttttcctccctctcctcttccttattcctctttggcataaaaaaaatgaatgtgatatgaatcctacccatgaggaatttttagtcttataattaggactaaattagggagatgcacaatgaaaatacagtgcaatatacagaaatagtagaagaacaaagcactcttggagttcaggggaggcctctttacaattgagaatgaagctgcagcttgaaggatgagcaggaatagaaaggggtgatcacagttcctttctctaaggtggttaatgctgaaccacagttggcttggctgatttcaatgaccaggcatgaagactccagcacctaatccttcagacttcagtgctgattgaaatgttctgtatctacaatgtctaatatggtagtcactagctattgagcacttaaaatgtggctcatgccacactaattttattaatttaaatatccatatatgtgtggatagtggctactgtattggacactacacatctagcaggttctctgattcctaaattgcagtagctactgctaggcccagtgaggtcccagctagaacaaactttccacccttctctttagacatggaccccaagtcacccctcctgctctgtgcttctttgtgcctcattgctgaagcagctctggtgctgaggcaccgggtgaagaaatcattcctttgtctagctctcagctatctctgttcagctgcaggtcagcccactttgatctatagttgcttccttctagagttctaggtgctttgggtactaggaaattccaccttctcattctattagccccattcacttcctccaaagcatgtgcatgtgctccttgtcaagactggctctgccattgagtgaaacttggcttctccctgttgttctaggctgacttctgggcctcatctccttaggggctggaaagccttcaagatcagtgccagcatccaaggaaatgctcttcctcatgtcagctcccctccagagccaaaagaagactactgtctcttcctgtttcaaaacgcttcatacccctaatgggcctcttatccacttatagtactctggatactggacactccattttttattttccaaccttcccctctacccccaacacataatatcctaatctttgtgaccatgcagttccctccacctggcatattcacattaaatgcacgtcttttctatgaaaacttctgtggtgactctagctcttgctcatctccctttaagagtttttgttttttttttcaaatacaccacaaaagattttattatgaaaaacatatgggtaaaatgtagcaactatgcggtttacaaaatgttctattattgcataaaactatctttggtctatcaccttctaaaacttcttacactctttcttggtgttaggtcaaatctgcaaatgctttatctgttctccatatcattagagctccatcttccacaaatattttaagatagaccttccctccacaatcattactcccacagtcttaatgtaaccagtgaacatggacagcagccgtccaatatacattcacattatcaaaacatgatggaagctgtagatatgcctaaatgtccacgtgagtacatattttttctagtagagtccttgattcttttttttaattttttttgccaacaagtattgtttactgcacatatataaagatgatttaatattgaaaaatttattaattaaatgcaccctaatgataggtccagtttcttatgattaagaaacaccataaggtgatcttaatagctacttaagaaacattcgatacaatttaaactgatttgtttacctcttagaaaacaagaatgaagtttttgtatgataagcaatattctttttttaaaaattttattattattatactttaagttttagggtacatgtgcacaacatgcaggtttgttacatatgtatacatgtgccatgttggtgtgctgcacccgttaactcatcatttagtgttaggtatatctcctaatgctatccctcccccctatcgacaccccacaacagtccccggtgtgtgatgttccccttcttgtgtccatgtgttctcattgttcaattcccacctatgagtgagaatatgcggtgtttggttttttgttcttgcgatagtttgctgagaatgatggtttccagtttcatccatgtccctacaaaggacatgaactcatcattttttatggctgcatagtattccatggtgtatatgtgccacattttcttaatccaatctatcgttgttggacatttaggttggttccaagtctttgctattgtgaatagtgccacagtaaacatacatgtgcatgtgtctttatagcagcatgatttataatcctttgggtatatacccagtaatgggatggctggatcaaatggtatttctagttctagatccctgaggaatcgccacactgacttccacaatggttgaactagtttacagtcccaccaacagtgtaaaagtgttcctatttctccacaacctctccagcacctgttgtttcctgactttttaatgatcgccattctaactggtgtgagatggtatctcattgtggttttgatttgcatttctctgatggccagtgatggtgagcattttttcatgtgttttttggctacataaatgtcttcttttgagaagtgtctgttcatatccttcgcccactttttgatggggttgtttgtttttttcttgtaaatttgtttgagttcattgtagattctggatactagccctttgtcagatgagtaggttgtgaaaattttctcccattctgtaggttgcctgttcactctcatggtagtttcttttgctgtgcagaagctctttagtttaattagatcccatttgtcaattttgtcttttgttgccattgcttttggtgttttcgacatgaagtccttgcccatgcctatgtcctgaatggtattgcctaggttttcttctagggtttttatggttttaggtctaacatgtaagtctttaatccatcttgaattaatttttgtataaggtgtaaggaagggatccagtttcagctttctacatatggctagccagttttcccagcaccatttattaaatagggaatcctttccccattgcttgtttttctcaggtttgtcaaagatcagatagttgtagatatgtggcattatttctgagggctctgttctgttccattggtctatatctctgttttggtaccagtaccatgctgttttggtgactgtagccttgtagtatagtttgaagtcaggtagcatgatgcctccagctttgttcttttggcttaggattgacttggcgatgcgggctcttttttggttccatatgaactttaaagcagttttttccaattctgtgaagaaagtcattggtagcttgatggggatggcattgaatctataaattaccttgggcagtatggccattttcacgatattgattcttcctacccatgagcatggaatgttcttccatttgtttgtatcctcttttatttccttgagcagtggtttgtagttctccttgaagaggtccttcacatcccttgtaagttggattcctaggtattttattctctttgaagcaattgtgaatgggagttaattcatgatttggctctctgtttgtctgttattggtgtataagaatgcttgcgatttttgtacattgattttgtatcctgagactttgctgaagttgcttatcagcttaaggagcttttgggctgagctgatggggttttctagatatacaatcacgtcatctgcaaacagggacaatttgacctcctgttttcctaattgaataccctttatttccttctcctgcctgattgccctggccagaacttccaacactatgttgaataggagtggtgagagagggcatccctgtcttgtgccagttttcaaagggaatgcttccagtttttgcccattcagtatgatattggctatgggtttcatagatagcttttattattttgagatacgtcccatcaatacctaatttattgagagtttttagcatgaagggttgttgaattttgtcaaaggccttttctgcatctattgagataatcatgtggtttttgtcgttggttctgttatatgctggattacatttattgatttgtgtatgttgaaccagccttgcatcccagggatgaagcccacttgatcatggtggataagctttttgatgtgctgctggattcggtttgccagtattttattgaggatttttgcatccatgttcatcaaggatattggtctaaaattttcttttttggttatgtctctgccagcctttggtatcaggatgatgctggcctcatgaaatgagttagggaggattccctctttttctattgattggaatagtttcagaaggaatggtacaaaaaacctttcaaaaaattaatgaatccaggagctggttttttgaaaacatcaacaaaattgatagactgctagcaagactaataaagaagaaaagagagaagaatcaaatagacgcaataaaaaatgataaaggggatgtcaccaccgatcccacagaaatacaaactaccatcagagagtactataaacacctgtatgcaaataaactagaaaatcctgaagaaatggataaattcctcgacacatacatcctcccaagactaaaccaggaagaagttgaatctctgaatagaccaataacaggctctgaaattgaggcaataatcaatagcttaccaaccaaaaaaagtccaggaccagatggattcacagccgaattctaccagaggtccctccaagaatttttacagcccgtcgtcttcaccatgcattttaacaattgggatctctcctgtgatgttcactattaggtcatgtgggttagtgttatctactggctagattgtgtctccttgagtatgagaccctttccatatttcccacacctcttggcacactgccaaacatatagtagattctcaataaacccttgtttgctgttttaatagataatagatttatgttgcagagctctttaaatataggcttcatttgttttgaaatcatgttttatatacttttcaattttactgtcatattgttcttgaaaagataagaccaagggttaaattttctgatatattttgatataaacttaagcaatagcttaagttagttccacagaagtatttcaaaaacccctctcagagcacaagtaaagccattacatattgatacaggcaggccagactttcatcagaaaaaatatagcagaaaataagggtaaagatgcaggtagactggtgaaatttttcatttgtgaagagtgatattggtgatttggcttatcaaatttgtttgcatattcctatgtatttctgggagttaactatgctttgttgatatggtcacagcacaatgcctttataataatgatgcacaggaaaagctttgcctagttcttatgacactctttctcacatcagagaagtggagagcctgctgagcttcagctgctaatcagtgtcacatcttctagtgtcaaaaattataatccgtgcttcccccaggcctatggattctctttttttttttttttttttttttttttgagatggagacttgctctgtcgcccaggctggagtgcagtggcgtgatctcagctcactgcaacctccaccgcctggactcaggagattctcttgcctcagcctcctgagtagctgggattacaggcatgtgccaccatggccagctaattttgtatttttagtagagacggagttttgccatgttggccagtctggtcttgaactcttgaccacaggcgatctgcccgccttgcctcccacagtgctgggattataggcatgagccaccatgcccagcccagattctcttaaactatgaaaacagtcaccaggatggagggtacttctttgagcttcttaattcatcatggcagaggcatcacatgcagttgaacagcttgttccctgcacaaaagctccccctggaaggggctagtagcaggaagtaggggctgaatttagcccagacttgacgtgggccttgacttgggctgccaaccctagaggcgggcttcatgcacttcctttatatgatatagcacctgtttgcaatacacagttagatgtggcttttatggagaaactcaactgagcttggtttcatctgggcttgccacagcccagcgattctcttaattgttttagaaatgatcaaagttggctgggcacggtggctcatgcctataatcggagcactttgggaggctgaggcggtcagatcacttgagttcaggagttcgagaccatcctgaccaacatggagaaaccccttgtctactaaaaatataaaaaaaattggctgggcacagtggctcacgcctgtaatcccagcactttgggaggccgaggcaggtggatcacgaggtcaggagttcaagatcagcctggccaagatggtgaaaccccatctctattaaaaatacaaaaaaattagctgggcgtggtggtgggcgtctgtaattccagctactcaggaggctgaggcagagaattgcttgaacccgggaagcagaggttgcagtgagctgagattgtgccactgcactccagcctccagcctggatgacacagcaaaactccgtttaaaaaaaaataataattagctgggtgtgatgatacatgcctctaattccagctactcaggaggctgaggcaggaggattgcttgaacctgggaggtggaggttgcagtgagccaagattgcgccactgcactccagcctgggtgacagagcaagactctgtctcataaaaaaaaatagaaaagaaaagaaaaagaaaaagaaaaagaaatgagcaaagttatcttctgaggcctaattaaacaatgatgcaatacattggaaaaccacgttgtatctgtttacttataccctgctttaatccacaaaaattttcaggcagctccaaagccaaataaaagtaattttcctttttgggttgccttccccagttgcccaaataatctagactttgtggtataatgggtgcatattgctctgggtttctattttaaaaaccgtctaacttgagatgcttttctttctcctcaggttggttaaatctagacttaagaggctctgctcctcagaagttggacttctgaaaaatgctgaacgagaacaagaatcagaagaagaaatgtgactttgatgagcttccagtttttctagataaaccttttcttttttacattgttcttggttttgtttctcgatcttttgtttggagaacagctggctaaggatgactctaagtgtactgtttgcatttccaatttggttaaagtatttgaatttaaatattttctttttagctttgaaaatattttgggtgatactttcattttgcacatcatgcacatcatggtattcaggggctagagtgatttttttccagattatctaaagttggatgcccacactatgaaagaaatatttgttttatttgccttatagatatgctcaaggttactgggcttgctactatttgtaactccttgaccatggaattatacttgtttatcttgttgctgcaatgagaaataaatgaatgtatgtattttggtgcaga

SEQ ID NO: 129 - DNA, 21920 bp, Homo sapiens
ggcacggaaaaggccaggcgacaggtgtcgcttgaaaagactgggcttgtccttgctggtgcatgcgtcgtcggcctctgggcagcaggtgggcaaggaaggctggtgtgtgtgtgtgtgtgtgtgcgtgtgtgtgtgtgtatgtgtgcgcgcgcgcgcgcctcccctggtgtaagagatgtgccagcggctggccgaggggcgcttagggctagagcccggggcgctgcagaggttgagagtcagtgggtggggcgcagttatcaaacaccagggcccaaaagcaggctctagataggttccaggtgctcaatttctatttcacgtttggagtgagccagtggaattgtgaagttgtggcattttgattcggttgccaagagttatcactgggcctttgcaggtgccaaataaatttcaggacagagcctaaggcagagctctggcacaggaaggaagtaaaacgtttaatgagcaaatggacgcatgtttccaagcggtggtaggaagacagcagtttttggttgtcttcctggtgatcagcatggaaacctagtagtgctcttactctgatcaatacattgtcgaaggcatgtacctgatgctaacgtaacaataatattaaatattgactttatttgctattatttattgctaacattaagtactgctacctgctatgtgctaggtttgtctctgaagactttacatgtatttttcacgtttaattatcataatcttaagaagcaggtaccataattatctccatttgacaatgaggaaactgaggctcttggagatttacttgtgcaaggtcatgcttctggttaccggactgcttggtattgggcacccccgatgtctgactccaaagcctgatactaatcaatcactgagctgactctgtggtcattaatataaaattgatagaagtactgtggtcactcaggtctcagtcatttacttcttcaacgggaagtcttcgtgtctaccccatataccaagctctgcagatgctatgagtgggagggcaggtacagagatgaaacatattaatagttgccattctaaaagagcttactgtctagcgggaggcagaaagaaaaggcacacttgccctccagtgtcagaaaaatggatgtgctgcatgcccaaagggtagggatgcccaacagccctgggactggggaggttgccttcttggtaggttaaatgaatgagtcagaagaggagaggctggggactgagccaatctgagaaggaaccactagaaatgaaagaagaatcccaagagcttggtatcagagaagcccagggaatgggacatttctaagaggaagtgtgtcccagtgtcagatgcaaacatttccattggttttagcaaaaaagccattggtgttattaacaccgaaagcagttttaagtgatgctgacttaatgagtaaatgggagagggaaaatggagacattaaccatacacacatgtccagtttgcttggctgtgaagagaaggggtgatacagggtagttgctagagtggaaagtgtggttgaaagaggattttttttttttttttttgagacagagtctcactctgtcacccaggctggagtgcagtggtgcagtctcggcttactgcaacctccacctcccgggttcaagcgattctcctgcctcagcctcctgagcagctgggactacaggtgcatgccaccacacccggctaattttttgtattttttttagtagagacggggtttcaccgtgttagccaggatggtctcagtctcctgacctcgtgatccactcgcctcagcctcctgaagtgctgggattacaggcatgagccaccacacccggccgaaagagaattttaaaaatttctttcatttgaaagttgagatagatttaagcatggttatgtgaaaggaaaaaggccagtcgagagtgacaggaatgagagttgaagcaatgaggggatgggattaagaacaagatttctgaggcagtaggacagtgtaggatcccataagggggcaagtctttaactgagacagcaagtaggttgtgagccaaaacggcttggatatgagaacgtgagaaggttcctgctcaatgatgtctcttttctttgagaaacagaaggcaaagtaattgactgaaaatgagatggagtgcagtggagaaatttgaggaaggtgttgaaggtttagaagaggtgcatagggcatgggctagggagctgagcctattgctaagggatggcagaggagtcttaagtgatgctggtcccagtctgcagggttgcatctaggtgttggaaatgattaggacagaggttgaagtgatctagggttgacatcttggcatatttgtgtatatttattgtatagttgttgcctaaatttccacaaatatatgccttgctggagtgcagtggtgtgatcttggcttactgcaaccttcacctcccgggttcaagtgattctcctgcttcagtctcctgagtagctggaaatacaggtgcgtgccaccacgcccgatggtttttttttttggatttttagtagagacagggtttcaccatgttggccagcctggtctcgaactcctgatctcaagttatctgctttccttggcctcccaaagtgctgggattacaggcgtgagccaccacgcctgacctaaagcttctttaggataagatttgtgtaaggggtttgcaaactcaaatggaggtgatataaatgagaaaaactctcagtgtctctctttctctctctctctctttttttgagacagggtcttgctctgtcacccagtttggagtgcagttatgcagtctcacactgcaagctctgcctcatgggctcaagtgaacctcctgcctcagcctctcaagtagctgggaccacaggcaggtgccaccatgtctggctaatttttgagtttctttgtagagatggtgttttgccaagtcacccagtttgaggctggtctcaaacacctgggctcaagcaatccatctacctcagcctcccaaagtgctgggattacaggagtgagccatggcatgaggccttgtggggtgtctcttttaaatgaaagcatactctgtttacgtatttgatatgaaggaatatccttcctttccacaaagacaaaaattatcctatttttctcaaaacatatgtcctttttctctacttttcatttttgttacttttgatggacacatgtgttacattgatttcactttctcataattctgctgtaagaaaaacaatagtgccagttcaatgacaaatagcaacagtctgttattgctagactgttactgttagtggagactaccagaacagtcagtcccagtgtcagggaatcaaagagaacatgttccctctctaaagggcacagctgctgctcagctttagctgattgctgccctgcaggactataggcccagtgttgctagatcttttgatgtttcaagagaagcttggaatctagaatgtgatgggaagtctcttacatttaaacatgttggcaattaatggtaagatttaaaaatactgtggtccaagaaaaaaatggatttggaaactggattaaattcaaatgaggcatgcagattaatctacagcatggtacaatgtgaattttctggtttctttaattgcactgtaattaggtaagatgttagctttggggaagctaagtgcagagtatgcagaaactattatttttgtaagctttctctaagtataaataaatttcaaaataaaaataaaaacttagtaaagaactataatgcaattctatgtaagccaaacataatatgtcttccagtttgaaacctctgggttttattttattttattttatttttgagacagagtcttgctgtgtcacccaggctggagtgtagtggcactatttcggcccactgcaacctccacctcccaggctcacatgattctcctgcctcagcctccggagtagctgggattacaggcgcgtaccaccacacccagctaatttttgtatttttagtagagatggggtttcaccattttggccaggctggttttgaactcctgacctcaagtgatccacttgtcttggcctcccaaaatgctgggattacaggcgtgagccactgcaccaggcagaggcctctgttttttatctctttttggcctctacagtgcctagtaaagcacctgatacatggtaaacgatcagtaattactagtactctattttggagaaaatgattttttaaaaagtcattgtgttccatccatgagtcgtttgagttttaaaactgtctttttgtttgtttttgaacaggtttacaaaggaggaaaacgacttcttctagatttttttttcagtttcttctataaatcaaaacatctcaaaatggagacctaaaatccttaaagggacttagtctaatctcgggaggtagttttgtgcatgggtaaacaaattaagtattaactggtgttttactatccaaagaatgctaattttataaacatgatcgagttatataaggtataccataatgagtttgattttgaatttgatttgtggaaataaaggaaaagtgattctagctggggcatattgttaaagcatttttttcagagttggccaggcagtctcctactggcacattctcccattatgtagaatagaaatagtacctgtgtttgggaaagattttaaaatgagtgacagttatttggaacaaagagctaataatcaatccactgcaaattaaagaaacatgcagatgaaagttttgacacattaaaatacttctacagtgacaaagaaaaatcaagaacaaagctttttgatatgtgcaacaaatttagaggaagtaaaaagataaatgtgatgattggtcaagaaattatccagttatttacaaggccactgatattttaaacgtccaaaagtttgtttaaatgggctgttaccgctgagaatgatgaggatgagaatgatggttgaaggttacattttaggaaatgaagaaacttagaaaattaatataaagacagtgatgaatacaaagaagatttttataacaatgtgtaaaatttttggccagggaaaggaatattgaagttagatacaattacttacctttgagggaaataattgttggtaatgagatgtgatgtttctcctgccacctggaaacaaagcattgaagtctgcagttgaaaagcccaacgtctgtgagatccaggaaaccatgcttgcaaaccactggtaaaaaaaaaaaaaaaaaaaaaaaaaagccacagtgacttgcttattggtcattgctagtattatcgactcagaacctctttactaatggctagtaaatcataattgagaaattctgaattttgacaaggtctctgctgttgaaatggtaaatttattattttttttgtcatgataaattctggttcaaggtatgctatccatgaaataatttctgaccaaaactaaattgatgcaatttgattatccatcttagcctacagatggcatctggtaacttttgactgttttaaaaaataaatccactatcagagtagatttgatgttggcttcagaaacatttagaaaaacaaaagttcaaaaatgttttcaggaggtgataagttgaataactctacaatgttagttctttgagggggacaaaaaatttaaaatctttgaaaggtcttattttacagccatatctaaattatcttaagaaaatttttaacaaagggaatgaaatatatatcatgattctgtttttccaaaagtaacctgaatatagcaatgaagttcagttttgttattggtagtttgggcagagtctctttttgcagcacctgttgtctaccataattacagaggacatttccatgttctagccaagtatactattagaataaaaaaacttaacattgagttgcttcaacagcatgaaactgagtccaaaagaccaaatgaacaaacacattaatctctgattatttattttaaatagaatatttaattgtgtaagatctaatagtatcattatacttaagcaatcatattcctgatgatctatgggaaataactattatttaattaatattgaaaccaggttttaagatgtgttagccagtcctgttactagtaaatctctttatttggagagaaattttagattgttttgttctccttattagaaggattgtagaaagaaaaaaatgactaattggagaaaaattggggatatatcatatttcactgaattcaaaatgtcttcagttgtaaatcttaccattattttacgtacctctaagaaataaaagtgcttctaattaaaatatgatgtcattaattatgaaatacttcttgataacagaagttttaaaatagccatcttagaatcagtgaaatatggtaatgtattattttcctcctttgagttaggtcttgtgcttttttttcctggccactaaatttcacaatttccaaaaagcaaaataaacatattctgaatatttttgctgtgaaacacttgacagcagagctttccaccatgaaaagaagcttcatgagtcacacattacatctttgggttgattgaatgccactgaaacattctagtagcctggagaagttgacctacctgtggagatgcctgccattaaatggcatcctgatggcttaatacacatcactcttctgtgaagggttttaattttcaacacagcttactctgtagcatcatgtttacattgtatgtataaagattatacaaaggtgcaattgtgtatttcttccttaaaatgtatcagtataggatttagaatctccatgttgaaactctaaatgcatagaaataaaaataataaaaaatttttcattttggcttttcagcctagtattaaaactgataaaagcaaagccatgcacaaaactacctccctagagaaaggctagtcccttttcttccccattcatttcattatgaacatagtagaaaacagcatattcttatcaaatttgatgaaaagcgccaacacgtttgaactgaaatacgacttgtcatgtgaactgtaccgaatgtctacgtattccacttttcctgctggggttcctgtctcagaaaggagtcttgctcgtgctggtttctattacactggtgtgaatgacaaggtcaaatgcttctgttgtggcctgatgctggataactggaaaagaggagacagtcctactgaaaagcataaaaagttgtatcctagctgcagattcgttcagagtctaaattccgttaacaacttggaagctacctctcagcctacttttccttcttcagtaacaaattccacacactcattacttccgggtacagaaaacagtggatatttccgtggctcttattcaaactctccatcaaatcctgtaaactccagagcaaatcaagatttttctgccttgatgagaagttcctaccactgtgcaatgaataacgaaaatgccagattacttacttttcagacatggccattgacttttctgtcgccaacagatctggcaaaagcaggcttttactacataggacctggagacagagtggcttgctttgcctgtggtggaaaattgagcaattgggaaccgaaggataatgctatgtcagaacacctgagacattttcccaaatgcccatttatagaaaatcagcttcaagacacttcaagatacacagtttctaatctgagcatgcagacacatgcagcccgctttaaaacattctttaactggccctctagtgttctagttaatcctgagcagcttgcaagtgcgggtttttattatgtgggtaagaaactgaatctgctaattaaaaaaaatatatttcattttatacattttagtgggcaaattatgtgtattcataagttttggtctaaaattaattttaggtaacagtgatgatgtcaaatgcttttgctgtgatggtggactcaggtgttgggaatctggagatgatccatgggttcaacatgccaagtggtttccaaggtaattgttttgaaattctctttgcaaattcttgtgattatcatgagattgcttatatgtgttcacctgaaatcagttgttactttactctgttccaaatatatatttgtgaataagtttaggatggattacttagtaaaatacttacttaaaaagtttcgatggacttaagacaacgaagaaatagatttggggatttttgtttaatttttaaagaaatatatatatatttaaataatacatgctcattataaaaacaaagtcacacattgtagaaaagcacagagaaggaaaattaaaatgtccagaaatcttaccgcctaaggatgagcatggttaccactttagtgaacatccctccagacatatagaaataaatgtatatgatacatatacatatagaaataaatacatatacatatagaaataaatgtacaccattttacataagttaaatattatatctagttttgaagttttttcagtcaacatttgtcttggatatatttccattcattcggtattcaataataattgatcacctattggcaggcattgttctgggtgcataaaatcagttgaacaaaacaaagacccctggtctcctaagtttttattatagcacgagagaacagacaactaataaaaacttgaataagttctatagcatgttggaaaataagtacaatcaataaaaagaacaaagaggagtttagaaatgccaggcaggttacaatattaaattgggtggtcagggtaagtatagactcatctcatctgttttagtcgccacgcagcattttaatgtgatgtgttacccttttgattgtttaactggccacctagtgttctagttaatcctgattagcttgcaagtgtgggtttttatcacgtgggtaagaaacttaatgtactaactaaaatatcagcttcaaaaagttttttacactctcctttttcatctaaatcatgtggcctacaattacattttttcatggtcaaaacttttgctattattcaacccgtttcccatttgccctgagaatactgcactggcaacaagctgcactgttttttttctaaatgggaaatgggttaatatcgattaataaatgtggcatcttaacttattttgattactttttttcctcttttcttttgagatggagcctggctctgttgcccagattggagtgcgatggtgtgatgtcagctcactgcaacctccgcctcttgggttcaggcaattctcatgcctcgagcctcgctagtagctgggattacaggtgcacgctagcatgcccagctaatttttgtatttttgtagagacagggtttcaccatgttgtccaggctggtctcaaactcctgacctcaggactttgaggtgcttgcccggccaacatcagtgtgttttaagaatcttagaagagttgaagagagtagctaagagctctgaggagagatggtcttacttgacctcagtagactgaggggctcctgacccttgtccacttgagccttggtagataactagtaatcaccttcctcttgcttatatcaacctgcctttcactgcaatatctctgaccattccctatatgctaaatgaatagtaaattgattatatgtacatttatactcatttgaaatatttatacttcacaatatattaagagtaaattgattatatgtatgtttatactcacttgaaatagccagtctacaaatggctggattagtcctgcccaaattaagataaacctttagaacttttcaaaattagctgaagtggtcgggtgcagtggctcatgcctgtaatcgcagcactttgggaggctgaggcaggaggatcacttgaggtcaggagttcgagaccagtatggcaacatggtaaagccccatctccactaaaaatgcaaaaattagccggccatggtggcaggcacctgcaagctcagctactcgggaggctgaggcaccagaatcacttgaacctgggaggcagaggttacagtgaactgagatcatcccactgccctccagcctgggtgacagagcgagactctgtctaaaaaaaaaaaaattagcagaagcataatgtatcttggcaaatataaaaatattaattttgtaaaacattcaacctgtatgaaaaatgttgactgtcatgagaagcatcttacaaaacaattaaaaattcacacaaaaaatttgaatcctgtcataggataactatgggttagttttagaaaaaaagttttttttttaaaagcaatacaatagaatcagttcccagtgggctaggatgtatttattcttctaacattaagtttagaataaatgatcttaaatgattctgtgatttgaggcaaacaaccagatttgaaatggaataaacacctagagatgagaaatttatgttattacattttcatttcacttgtataaataatccctcaaattttattttctttacattttaggtgtgagtacttgataagaattaaaggacaggagttcatccgtcaagttcaagccagttaccctcatctacttgaacaggtagggcaagttctttttttaaatattggttgccatcagagaaattgctttctgataattacagagagtgctatttgagtgaaaagacaagagttgttttagaaatacattttctttttcttatcaaacctgacatgattttagaaagtattattctttggagaaaaatagatccataaatggtagtctcctgataatgacacttgtgatgtttttcaaacaagttgcaataaatcaaacttcgagaaaaaatgactgggatagtagtatttaacagtttcactatataaattttccttcaaaagatctgagaaagagaattttattgctttttctaaccttgagaaagcaaataacttacataatagtttgatggtcaaacccatcctagccatgagcaatgaaactgatacagggtccaacttatcccaaaggatgacccagggtaggtaagacctgtggatgaaaggaaaattgattgtcacatggattatggaaaagatatagtccgtttcctgccttaatgaaaatgggttttgttattatatacacacactgaaactctattagtttatggcctagggaataactatcaaatataaatgaaatattgcttttggttaaaaaattattttgccagtaagcaagtggtttgcaacaagttgaataaaatatgtctgttgggtcattttcattgcaatgggtaagataagatttctattttaatttatatatatatatatatatatattttttttttctgcagctgctatccacatcagacagcccaggagatgaaaatgcagagtcatcaagtaagtacaatggataataatgaatgcatttaaatagagtcatttggtactgttaatattgaaagttgataatagtaatgtacctgtatattgatttataatttacgatgaatgcattttcaaatatactgtgttggtatttcccaaacttcagtgcatatcagagttgcctggagaactttaaaaaatatgacagatttccagtttctacttcagacctactgaattaaatctgagtatctaaaggtggggctcaggcatgtatagttttaacaaactacatacatccagcctaacacttgttcttgggccagtgtgggagcagatgtactatgatattagattgctcacatattctttctgtgaaagggaaagaatagaacacgttagtcacctttttaaatagggacgctgaggctcagaaaggttaaatgacttgtacatcaccttacacctaaaatgcaacagagctaatatttgtacaagcccctctactccattatctcatgttcaattcaattcagtatatatttattgtatattgtatatcgcctgttctgaggaaagcatagagaacaggatagagccaacccaaatgtccatcagtgatagactggattaagaaaatgtggcacatacacaccatggaatactatgcagccataaaaaggatgagttcatgtcctttatagggacatggatgaagctggaaaccatcattctgagcaaactatcacaagaacagaaaaccaaacaccgcatgttctcactcatagttgggaattgaacaatgagaacacttggacataggaaggggaacatcacacacagggcctgttgtggggtagggggatgtgggagggatagcattaggagatacacctaatgttaaatgacgagttaacgggtgcagcacaccaacatggcacatgtatacatatgtaacaaacctgcacattatgcacatgtaccctagaacttaaagtaaaataatttaaaaaaaggaaaaaaagaatacagaacaggataaacataactcctggtctcatgtatctactggaaacagacaaatacacagacaggagaaagggatatggcagcaaaagtaaagtgtaatatgagagtgcatataggacaattaacccagacttggagggtcagaaaaggctttccaaaggaagtacttgtcttagcagaaaatccaagggaagagtaggagttaaccgagtgacaaatggaagaaaagagtattccaggcagagggaacagcatatgaaagaccgaagtgacaaaggagaataggcacctttgaagaactgaacaaaattccatatggccagaagtaggagttgctaatagataaatcagggaagcaggccagctgtatgagtggtcagcactacaggcagaattgacactagagccatcagtttgtgacttctgggctagagtgcagaatgtgaatgattcagtggcaagagatgaggctgaagaggtaaacaaggttcagattgtatgagactttgtaagacactttattttggattttatcctaagagcaatggaattgttgatggaatttaagaagtgtgacacatcatatttgtgtttttaaaaagtcactctgattgcactgttgagaatgaattccaaggaagcaatattttataaccatagcctctctgaaaaatatgtgaattattcttgattgaaaactcatttgttcattcaacatagggaaaaataatctcaattctagtgggaggtaatccctgccattctgtttccttctcctgctcacatatgtatatccagttatgacaggtaatgtgtattttgcatctaagtacaatattccaagttgttatttaatgactgaacgtgtatatcattttaaatttaacaatgttcatacaaaataatgcctatacattttgttggttttacatttttaatattataaaacctttcaatttttgatttcatttcaaatttcaatttttaagaaatataaggctatcctaatatgtgttaaattctttgttccatatagttatccattttgaacctggagaagaccattcagaagatgcaatcatgatgaatactcctgtgattaatgctgccgtggaaatgggctttagtagaagcctggtaaaacagacagttcagagaaaaatcctagcaactggagagaattatagactagtcaatgatcttgtgttagacttactcaatgcagaagatgaaataagggaagaggagagagaaagagcaactgaggaaaaagaatcaagtatgtagatttattaatacagtctattttcataaggatttgatatcagtctatatgttatgaaaaatatactcatctagcatatctgaaaatatactcaatccagtcaggtttttttcatgtttagtattctgaattcaaatgctgaaaaatttattcatattcaaatatatttgagttgctcataagtcaaaaatgtatgatgtacaaaagtatttttcatgtttttccttaattcatatttttttctctggatagctgacgttgtgtccaattatgcattcatggcacattttttttttcttaacgctttgaaaatggaatccttgttgcatcatggcacatttttaatcccaggctagttgctcactcccctttggagtaaatcagggtgggatcagggacaattattaatttttttttgagacagtcttactctgtcacccatgctggagtgcagtggcatgatctcaactcactgcaacttctgcctcctgggttcaagcaattctcgtgcctccttcccttagctgggattacaggcacctgccaccatgccaggctaatttttgtatttttagtagagaagggatttctccatgttggccacactggtctcaaactcctgacctcaagtgatccgcccgcctcggcctcccaaagtgctgggattacaggcatgagccaccgtgcctggctggatggttattaattttaatgttagcataaaagcatgtcttagcctgtgactatacattaatacacaaattactattaagtcccctacctgtccacacaagaactgagtcttccagagcatccgtcgattatttaggcaagtcctagtatactgtttcacaatctcttaggacaagttgttcatgtccttccatactaaacgtatccactatgttctctattgcccttcacaaaaactcttctgggcacatacattctcatctggctgttttgactgctatcatcattctgtcctagacaaaaagaaatgctgatctctcctttcccaagcatggaccagacctataagtcccttcaacacagctgaaaacagactgcaacttttaacaagctcttactggagacttaaggaaaacggaagggaattatatcacaaatgttgatttacagctgcaactagctgtgacctctcttagtgcccccgggctcatcctcataaatctcccctgcctagcttctggttcatctctgtgtagctttggcaagtttacacaagtcactaggaatgtcccaataatgttttcctttatcaaaattcaggcccccccaatattcataaagctcagaaggagaataaagatttctccttatccttgtgcaaggccatctgggatctatttcttcacaggatgattgacagtcagattgtccacttcatttagggataaatccaaccctgcccatgaagatggatttgttctctgacccaacccagacaaacctatcagaccatagtgatatagcatcatacattcaccaaagtgtgaattactcagtctataaaccactagtgtagcagcaatacagtcacggttaacctttgcccagcctcatcaaattctcttttctctgtgaagattaggcaagcatgtccttcctgtagccttcttagtggtagccatttgtcatcagccaacaattgctcaaagaagagaacacttatctccacaactgttgagagaccccataaaatctaaaactatccacttataaaatatttatatttctttcaaagacaatcagaaaagtctccagaaatgacttcaagtcaacaatatataataatttacattgtgaaaaagagcccttagcgtttctgcctcaccattatatatatatctctactacctagtatcgtgcctgcatatagtctgtgttgtgagtgagtgaatgaaaacacatttaggttaatgattacgttatagtttcccaagaatagtagggatataaataaagaggtaatttaagattttttttttcccagaataaaataataatatggctgagtgtggtggctcacacctgtaatcacagcactttgggaggctgaggcaggcagatcgcttaagcccaggagttcaagaccaggctgggcaacatagcaaaaccctgtctgtataaacaaatataaaaattagcagggtgtggtggcatgtgtctgtagtcccagctctactcaggaggctgaggtgggaggaccacttgagcccagggaggttgaggctgcaatgagctatgatcatatgccactgcattccagcctgggcaacagagtgagacactctctaaaagaaaaaaaaaaaagaaagaaagaaaagcaaaaacaaaattaataatatgcttcaaaggcaactactcaggaggctcaggtacaaaaatagcttgaacctgggaggcagaggttgcagtgagctgagatcgcaccgctgcactccagcctgggtgacagagcaagactctgttttaaaaatgaataaataaataataaaagaaattttatggaagaatgatactttaagaaaaaattgttttaattcaggctgaatgtggtgactcatgcctgtaatcctaacaccttgggaggctgaggcaggtggattgcttgagcccaggagtttgagaccagactggacaacgtggcgagaccccatcactacaaaaaatttttaaaacaaagtatttgtgatggtgtatgcctggtaatcccagctactcaagtcttctgaacttgcaaaccagaatatagtctacaactttgaaatgagactttttctcagttactagcaattaaattttagaaatcttaagaacttcagagaatgcattatattaggttacgtataattacaaaaataaatcttagattgaaaaactagtatacttcaacaccaagtttgtatttttattttctaatatatccctactttgctaatagaaataatttaacaaaatatattaagttctaagtcttctacccctctcaccattacttttcattcctactctttaaattatagaactaaggtttgattgttcatttgttcaacagatatttatggagcattaactttgtgccagacactattctagctcctgacccttttctcatttattctcagagcttccattattttcaaaatatgtctttagccttgtctttttgactaagcatcatctttattttctggttgttgtttttgatttttgctgttttcttttttccattttttattctttcttaaatggttctttttatgagtcctatcacttgacaaagtcagtgtatctaaaatctaacaatcctctctcccaaaacaattcttcagatagctcagcctctgtcattagttattttttagaaacagctttatggattatggtaagctatatgaaaattaataaacttagattcataagttatattccaaagagataataaaactgcagttttaaaatataaaatgttttaccaatggatacaaaatctaggtcttgaaggagaattagatgatatcttgtaggacgagaaggtagtcgttgacaaatagggtttattattcaaaatgctgttactgcctttccctgcttactataaaatatttaggtaatggcaatatgtctaatttctggaaataattaaaatttcaacttaaaatggaattttaaagaaattttatgggccggacataatggctcacacttgtaatcccagcacttttggaggccggagtgggcggatcactcgaggccaggagttcgagaccaggctggccaacatggtgaaacctcatctctactaaaactacaaaaaattagctggatgtagtggcacatgcctgtaatcccaactactcaggaggctcaggcacaaaaatagctttaacctgggaggcagaggttgcagtgagctgagatcgcaccactgcactccagcctgggcgacagagcaagactctgttttaaaaatgaataaataaataataaaagaaattttatggaagaatgacactttaagaaaaaattgttttaattctcttgattttgtctttccccaatttgactagattgaattgaaacgtcaattttaatgggttctaagttccatttggttaaaggcttagcagtattgccaaatgattgaaagcacagtacatgacaccagactacctcagtttgatttttgctagttgtggtgtccttcggcaacttaattgcctcactgcagcttcattttctcatttgttaaatgaggctattaggacctacctcaaagagctgttgtgaagatgaaatgaatcaatacatgtaaagttcttaacacagtgctcactaaatgttagtccttactataagtagcattattattattattattatatttttttaagacagggtattgctatgttgcccagtctggtctctgactccagggctcaagtgatcctcctacctcagcctcccaagtagctggtgctacaggcatgtgccactgcaccctggattataattataataacattattattaagcaaaggagatgagacacccctaaacctagcaatcaacatcaatgccttactgattacgaattaaagatagtttttatcctgctatatatataggactggaaggaagtttgtgagcagagtttgaacatgtttatgcttgttttcttttttataaagatgatttattattaatccggaagaatagaatggcactttttcaacatttgacttgtgtaattccaatcctggatagtctactaactgccggaattattaatgaacaagaacatgatgttattaaacagaagacacagacgtctttacaagcaagagaactgattgatacgattttagtaaaaggaaatattgcagccactgtattcagaaactctctgcaagaagctgaagctgtgttatatgagcatttatttggtgagtgatagaaaattatttttaaaaattttctaagtcaattgaaaatacgctcttattaataatttatgactactgaaaataattcaggctgaatgtggtgactcatgcctgtaatcctaacaccttgggaggctgaggcaggtggattgcttgagcccaggagtttgagaccagactggacaacgtggcgagaccccatcactacaaaaaatttttaaaacaaattatttgtgatggtgtatgcctggtaatcccagctactcaagaggatgaggtgggaggatggcttaagcctgagagatagaggctcccatgagctgtgattgtgccactgcactccagcttgggtgacagactctgtctcaaaaaaaaatcaatctaatttatagatattagttacataaaaagattaaagacttctgttgccttgaaatgagtatttggctatagtctaaagtgttcatttttaaaatagattccatagctaaatattaaccttatttgtcatagtaatgctttttctttttctcccttagtgcaacaggacataaaatatattcccacagaagatgtttcaggtaatagtactaatattttaaatcaatagagaacattgtctttattttcttagtttttcactgaagaagcaaactgccttttattaaaaattctttcctctttctagatctaccagtggaagaacaattgcggagactacaagaagaaagaacatgtaaagtgtgtatggacaaagaagtgtccatagtgtttattccttgtggtcatctagtagtatgcaaagattgtgctccttctttaagaaagtgtcctatttgtaggagtacaatcaagggtacagttcgtacatttctttcatgaagaagaaccaaaacatcgtctaaactttagaattaatttattaaatgtattataactttaacttttatcctaatttggtttccttaaaatttttatttatttacaactcaaaaaacattgttttgtgtaacatatttatatatgtatctaaaccatatgaacatatattttttagaaactaagagaatgataggcttttgttcttatgaacgaaaaagaggtagcactacaaacacaatattcaatcaaaatttcagcattattgaaattgtaagtgaagtaaaacttaagatatttgagttaacctttaagaattttaaatattttggcattgtactaataccgggaacatgaagccaggtgtggtggtatgtgcctgtagtcccaggctgaggcaagagaattacttgagcccaggagtttgaatccatcctgggcagcatactgagaccctgcctttaaaaacaaacagaacaaaaacaaaacaccagggacacatttctctgtcttttttgatcagtgtcctatacatcgaaggtgtgcatatatgttgaatgacattttagggacatggtgtttttataaagaattctgtgagaaaaaatttaataaagcaacaaaaattactcttattcttcattgctttatttcaatgacattggatagtttagtcactcccagactctttccataccttcttaaagcctctcaaatattgaactacagtttatactccttcccataagatgcttcttcattgacacttgtagaacacggggtcaacacatcataaaatctattatggaatgcctgagacaagaatcaaacagtccctttagtaagtttgtttattcacttctctattgattcattcaagaagtctcatgccagccccacctattggaagaaggtctgagttttattcttatctctttggtattaattctgaaacttagaaagtacactggttagcaatgcttgggaccaacaggttgttctggtaaataaatctgtttcatattgtcagtgcaacaaaatgtccccctctgcattatgttattggtactcaacacgtccgagtcataactctgtcctttgcttcttatagaggtattaggtcttcaagagcagaagtaagactgtaatagggaatactcaggggaaggcaggcaaaggctagtcatctaaaccagttctagatgtctgtataggggcagatggctctgtaagggcagaagggaaagaccccttcataagggtcacagctgacaatcctataacaaaagacaggttaacaagagaaaaacttaacaaatttatttaatcacagatttacatcaccggggagccttcgtaatgaagatccaaaattacaggggaaactgtgcatttttatgcttaggtttgataatgaatggacagccctgaagaatagtgattggaaaaaaaggatatgatctaatgggaatagacacaggttggggacccagcaaggcctgtctgttcagattattcttggtctctgtgcagcattccttcctcctggatatagggcagggcctgtatgggatggggatattataacctgctatcaagcaaggtaggtcagagaatttatttatggccagctcttacatagttaggtgaggaaagattagagtactatctttaagatgtaagtctggcattgtggaaagatggttccagtttctatgacctaccttggggaagaggaattcaagtttctgtggcttgccttcagggagaatgaggctgagacaggagggcaggataacatcagagaaaaactttgcttctgaggccttcactttgggttttctgagccccaacatctgctagtgttgtaaagagaacaattagggaccaagtgaggggaggaaagaatccatctctgcattctgatgctgggagacttatttccttgaaatgcaattgattttgcctctgctaagaggctctgctggctacccatgtactagccagtgtcctgcatgggtgctaggctgaattatttgtaattgtgcttaggtgatttgtaactcaggtatagggtatttaaatagtaggcaccctttttgcaccatgtgtttttttttttatctagttcttgtatactacagataatatttgaactttgtcatctcactgtaaaacttttgttcatttctcattatggtaataaatagctattataaccaacccatttattcaaatatgttatttccctaagtgttattttgacattttgttttggaaaaaataaatcaccatagataataa

SEQ ID NO: 130 - DNA, 19297 bp, Homo sapiens
ctgcatcgggcctcactggcttcaggagctgaataccctcccaggcacacacaggtgggacacaaataagggttttggaaccactattttctcatcacgacagcaacttaaaatgcctgggaagatggtcgtgatccttggagcctcaaatatactttggataatgtttgcagcttgtaagttatttcccttcatctgtttcaaatgttagcattcaattttagccctggttttggcttcagtcagttttgcgatagtagtgaagtaaagacactaggattttaaacagtaggaaaagttaatttagtctaacttttaatatgcaattgagttttgctatataccattgtactgtcatagttagagctgaaaattgatgtttttggtatctttttttccaaaggcaattgagtaatttggattctgtctctagtcggtctgtctctttagtttcctatacttgacaatgaggtcaaacttagcaaataacaaaacagctttgataaatgggcatcaaggttggaactgagaattctctctactgaagatgattccataaacttttttggcagtgacttcggtgctttttggctaccttgcagttagtttgaagcagcttaggaaagagatcagtctgatcatattttagacattatacagagaagaaggaggagaatactagacaaactagtggtaaatttgcttctgtctttttttgcttttgcagctcaagcttttaaaatcgagaccaccccagaatctagatatcttgctcagattggtgactccgtctcattgacttgcagcaccacaggctgtgagtccccatttttctcttggagaacccagatagatagtccactgaatgggaaggtgacgaatgaggggaccacatctacgctgacaatgaatcctgttagttttgggaacgaacactcttacctgtgcacagcaacttgtgaatctaggaaattggaaaaaggaatccaggtggagatctactgtgagtgctttagaaaatctttgtttttctctcaattttactttaaaatcactttttaaaaatgatattttaaaaaaagttttaaaatggatattcatgtacagattcttggctaaagaacatacaacatcaggaaagctagggacagctaaggccaacatgagagagagcaggaatccaaatcttggcttctatttctacctctgccacaaacacagtgaccatgtataagactcaacctctctgggctctggtttccttagctgtaaaatgatcatttctaagtttctttttgttttattaaaaaatatttccatttgattacatccttacatgtttacttgcttatgtgtctgattgatttatgaattccatccttcagggattttctattcatttattcttatgcaatttgatgcttaaaattagtttaaacattaagtagatctataattagtaatatgtattagtataaaagtgttcttcttagacataattgttaatatctggaaacatttcaatcatttgactttggtgttgacacatttaggatttttttttggtttttttggtgccatgaagccttggtgctcaaccgctcaacttcaaagatatttatataatgaactagatttgcctcatgaaagtgagtggatgtccctagtttaccagcctgacaaaatgcatcccactccattctccattcagcaaacaaagttagcaagaggagtaaaaaactaaccagacataaatcatttgccttttgttactgatggcctctctttctaaaaaactgaacccatttacggtcatgtcttcatgaagacctcatttgattataattactttggtttcgttttattgtaccggagctcaacttttcccagtaaccttaattgattctgcaacaaaccgcatgtgttgctcaagcttcccaagaaactgtgcttggccggctgctttcaattatgctggttgtatgtgcatagtttatgtctgtgcagcctcccgagctccttgaaagcttcccttatgtaaatacagggaaaagtagcaagttcttatgttacctgacatcgaactgtgtggattagaggaacatttcttacagaatatgagggacagaaattattgctggaaaaatgaaaaataccatgtttcttcacataggaaagaatttccagctcctttgtcttttgcccactagtaccaaatagttgaagatttaagaaagagaaatgaagacgcttctggttttaattatcttgcctgaggtttttctccaagagtgtctgtttctcattatgtataacagttctgtctcctttccgcatttgattgtaatagtggttagagttgagacctttgtattctttttgctacacagttttgaatccaccaatatgttacttcatcataatgcataatgaaaaaggtaactcttgcaaaggaggcaatggccacgtgaagtagtgtatttccttgtactagaagcttcaatggaacacttgttgggatagtgagttaggcatttcaggaggcaaatatgtgttccagaacataaagattgcacaaatgtatctttctggtggatgaattcctgtcagaggcaccattttcagaagctaattacttaaagttggtcttctcatttcttagaatatcttgacaataactattctttgcaatgacattccaaggcttacagtcattatctgtaaaatggaaatatatctgccctgactataataagaaaatgtgatgtaacataatgtaaatctgtagtagcaaaacacaataatggaaatcctgagtttaaatcccagctttaccatttactaggtgtgtgaccttagacaagttatgtaaatgtactaagtccaggtcttcttttctgtgaaatgtgatctctatctcctagagttattgtgaggataaaatgaaatcattcatgttaaatctatagcacagtgacagccacatgtaaggttcaatataaacattattttttcttctttcttttactgtaataacatgcaactcttaatatatacaggatcagaattgaataatgttgtaaaaaatgtttgcttccaattcttgtgccttgaactcaccccaaatcatgaaaggctattcaaacagttctgtcgtattaagactgtattaacaaaaacgctagacttgatttgtattgtgttaaagtggtaagagaccttatatcacattagcaaaaagcccatccatgtatttgtttggccttttcagcttttcctaaggatccagagattcatttgagtggccctctggaggctgggaagccgatcacagtcaagtgttcagttgctgatgtatacccatttgacaggctggagatagacttactgaaaggagatcatctcatgaagagtcaggaatttctggaggatgcagacaggaagtccctggaaaccaagagtttggaagtaacctttactcctgtcattgaggatattggaaaagttcttgtttgccgagctaaattacacattgatgaaatggattctgtgcccacagtaaggcaggctgtaaaagaattgcaagtctacagtaagtacttgtgcgatgtgttccagtctttgtgggaatcccaccttggttgtgtatagcaataaacttagcagaaaagtaaaaaaaaaaaaaacttgtatatagtttgtattccatttgtattcattcacaacataatgtttgtcaatagtataattcagtgaaaagaacactggatttggactgagaaggcttgagcttaatttctggctctattaactgtgtgagtttgggttacttaatttctctatttcccagtgtataaaaggggaatagtaataccacctgattgggtagtgggaaataggctcaaatgataaaacattttaatattgttttgtaaactcttatagtatgccttgaactattagttgcacaggtacagaaacttgacaaggtgatcacttattctgtgtgtgtatgtgtgtgtgtgtatgcatatgcacatacatacataggtgcactggacaggggaaaaatgacggggtttgattgcctccaatctccctgatactgccaggggatttgtgggagtcttgtagtcccagcgttgtgtaggagtggcctcactgtgctctgttctggactaaaatgctatgttctgcactgggtaccacatttaaagggagtattgccaactacggcatgtttagctgaaagagaatgagctgggaaggcttttaacaatattttgagaagaatagtcaagatagaggatatttttctgaagagaaaacaaaacctggctggaaaagacatctaattaagcatttgaaagacagttatatgaaagagtgatttaccttattctgtaacagcacagggctgaattatggccaatatgtttaaaatagtatagagagaagatttcagctcaatagggagaaatgtgctaatatgtagagctgtccaaaaatcaaattgactcttttggaaagcagtgggttgattctctcagtaaatgttgaagctgacttgaatgggcacttggcaagaatgcttaaatgggactcttacccttaagtgggaggttaagccacatggtttttcttaatttctgagtatctacaaccatctgaaaaatatgaaacatcaactaaacttgatcagtttagtcagaaactggatagactattttgaatgattcagcagttctttatactaatttggcagagtaatttcatcaaattggtggaagcacataaatactaagagaaatacattacctctgttgcactgggatgatgcttagcaattgctaatattattttttgccctttcagtatcacccaagaatacagttatttctgtgaatccatccacaaagctgcaagaaggtggctctgtgaccatgacctgttccagcgagggtctaccagctccagagattttctggagtaagaaattagataatgggaatctacagcacctttctggaaatgcaactctcaccttaattgctatgaggatggaagattctggaatttatgtgtgtgaaggagttaatttgattgggaaaaacagaaaagaggtggaattaattgttcaaggtgagtagaatgtgaaaaaggaatgataaaggtgctgtcagtgggatttgagcaatagtcaacacagcttcaatgctgaaattgcttcccttagtttcactgatgacctatctgattgccatatcctttagcacaaatatatgtttatcttactagtactctgtggaagtcttccctcccagagtttccatggctctgcttttctgattctttttcatctcatatcactttttctctgcttcattccctcactttctctcttcctccttccccttggatattggtattttcaagtttacacccctgggtcctcttctgttctcacactagattcccaggaattggactacaatatgttgattactcccaaattcatgttccaattccatgctgttaaatcctgtcagttctacctcaaaatgctccctggaatatgacctcttcttcaccccacttgccattgccttagtttatcatctctcacttgggctcctgcaagatattcttacataacagcattcgctaaacaccagataggtttctggcactttccatatgccatcctcaagaaataactaaaaagtaagtattttgtattcattttacagatgagagagtggaatctcccagagattaataatgacaccacctattgattgtacacctaatatttcccaggaattctgtattctgctttatatattttatctcattaatctttaccacaacactattaaaaacccaggctcagcatagttcatacttttcctggggctaaatagctctttagttgcatttactatgattttgatgcaggttcattttaatgaaaacccctttgcctttttaattttatagctaattgtctttattatttcttttttaaaatatttttaattgataaatcatgattgtatacatttatagattacaatgtgatgtttggtataggtatacaatgtagaatgattaagtcaagtcaacaaatccattgcctcacttgctcttttgtggtgatacatttgaaattcactttcttagctatttttaaatatacaatatattatcattaactatagtcatcatgatgtacaatagatctaaacaacttactctcctgtctaactgaacctttgtatccattgaccaacatctccttgttcccttccactcctcgccccagcctctggtaaccaccattctactctctacttctatgactttagaagtagatcccacatataagtgagatcaggaggtactggcttctctgtgcctggcttgtttcacttagcatagtgtcctctgggttcatcccttttgttgcaaatgacagaatttcctcttttgttttttaaggctgaataatatttcacatattttatggctaattatctttaaatagtctccctgctaagattctgtccctaatataatcaatcttatgcactgctcccagggtttattaccttaaacaaaaaggtgctcattttctataacttccatcacatttcttaaaactgtcacacagaactctttatgatctggtcagaaactacctttgcagatctgttgatgactcagtgcctctgcttacgctgttccttctgcctgaaatggcctttctccttccttcatctggcaaaatcttagccattctccaatatgaagctcatgtcagcctcccagttccagactgtgtcagaccaaactacatattctttctttcgtgtacactcaacactccttatagtcatgtatgctattctgttcagttcaacaaatattaagagcccttgtccaagaatccaagaattgtacttggtactgggggtacagatatgaaaaagatatgacaactgccctaggggagcatacaaactaggaaggaaggacaggcatataaataggtaacgcaaatattccttagtaagagccaaaataatatatctttttaaatgtgtctttccactaaactgtaaattcctgctccgggcacaatggctcaagcctataatcccagcactttgggaggcttaggtggaaggattgcttgaggccaggagtacaagaccagcctcggcaatatagtgagacctcctgtttctatttaatttttaaaaaatctgtaaactccttaaaatcaggaattctgtgtgtgtgtgtgtgtgtgtgtgtgtgtgtgtgtgaatgtttggattcttagcacagtacctaacacataataaatgttcagtaaatatttgctgaattaatgaatagattataaacatgggcagcatagtcttttgtttgttttaggaaatgagatcttgctatgttgcccacactgaagtcaaactcctaggctcaagtgatcctcccaccctagctgcctgagtagctgggattataggcacgtgccactacacccagctcaacacaaatttttaaaatgtgaaaacatggtatttaaacttggatgattaaaataaaaatcaaactcaccctaagtggattatctcggttggatgttaggttagcattctcaagtgaccaggaaagatattatactaataaaagtgtgtaaagctaatcattcaccctggaataatgtcactccataataaactgtatcctatttaaatgtacaaaggacatgtattttggggctggggagagttgttttgcactttgcatcacatgggatactactggcctaaagtactgaaagtactttcagagaaaccttcagctacctaaaagagttactcctccaatggttccaagttcacatggcaatacatgtggccactgtaaagaatgacttgagaaatgttcacagacaggcagtcgatctgttttttaaagttcctcattctcacactagcatataaaaaattcagaagctctggttgtttttgtgaatgagctctctttcaaaatctaatagcatatcagtttattgaggagaatcttcttcagaaaatactaagatgtcataattagacaaacctattgagaaaaataacttatggcatagatgagaaccatgcaaaatataatatgtttggattatttatatattgagatttctttcttttaccttaagcctgtaatttacaagtaagatttcagtgatttttatgggggggtcttatctgttgctttaaaagttgcccaaacactcccagtttcttcagggaaacagagccaagatgtggtgttccctttctccctaaatagcagtcatccaaaagaagcccatgcacccagccgggatagcgctgatggccaaagagcattcctggatatttgagtcttaggagtttgccctcacatctcggctttcagaccctgaattaattgtaaagtatttttatattgcatcaggcaaattttggaggtgacttatgtatcattttaatgcttagattttgactttgatttcaggatgatgctatgtgactttcagtggtataactgtattattggaacagaagctctaaatgcttgtccactgtgggcattatatctaattagaagacattttttgtagctttttccagtacctcttttagaccattttatcaccatatgaggatgacttgatttagttgttgtagcaactgaaaagctgggatcttgaatcagacccacctggcatcaagtcctaattttgctacttgcaaactgggcaaagttatttagcatttctgagcctaaatttcctcaagaagaaaaaggagggggaaaaggaggaagagaaagagtagaagcagaaagagaaggcaaagaagaaagaatagtactagtgtacaaaattgttgtgaggattaaatgagaatatatatatatatatatatatagtaatttagatagtgcttgacacacaagaaccacttaaattatttgagtgattgtccactcttacagtgatttgataaactacatttgagcagatactctattattgctgtgaagagatagcaacctctcttgacaaatttttatctattcaatttgttaaatgaatgaatcaacaaactatcgtggtttcattcttaaaagatgtgggctcatttctgatggtcccaaggtggaaaagagtaatttcttcttggcatggatattagctgaaaggagatcaggaaaaataaagatcatatgtcagaatgtgatgaaaaaagaaaagaatcttatgttcttttcatcttgttttccacctgtgtcccagagaaaccatttactgttgagatctcccctggaccccggattgctgctcagattggagactcagtcatgttgacatgtagtgtcatgggctgtgaatccccatctttctcctggagaacccagatagacagccctctgagcgggaaggtgaggagtgaggggaccaattccacgctgaccctgagccctgtgagttttgagaacgaacactcttatctgtgcacagtgacttgtggacataagaaactggaaaagggaatccaggtggagctctactgtaagtggttttcagaattgtttactgtttttttttttcagttctattggaagaaaaagaatgcaagtctgtgaagtgcaatgaaatccttatgtttagaaaaggaatttagccttgtgaattttgttcctaaatctgaatcagaatggtttgatgcaatataattagcttaaatcttaaatatatattacatatgtacacagcacccacaatccttggtttatgccttgtcaatactctctcatcatgcacttgaacacactccatgctggaggtgagtgcattggggtcagtgcccattcagaggactgggtggaggtgactactgttcagctactccagttgggaatgagtagttttaaactgttttaaggcactgttttaaaggcacatttgatgagctgtctgcaggatgggaaaaaaataagggaataggaagcagaaggaagccaaaattaaagataagaagttagattggggatggggatggtcagtgtcagtggctcaggtgaaaagcagaatcaggaagcagcgctagatcttaatgttgatttatgccacctacatatactacactttctctcactcttcttttgtcttaataaacattctttgcaacctcaaatctctatgaacttgacattgctggagttcctcagtccatattgaatgaagaacaaaatatgcaaagtgaccataaagttatttttttttgagggggtcactctgccttgttttattcagtagaactcaagagaacatatcgtagagattttctaccagaaaccctgcccaaacttgtgttacccttcaggattttgttcagaatgagttagagtatgcctgtaaagggatttgggtctctccaaagaaagataaattttatttgcattatcatattacccagagtccatgatctgctgagataggcacattcccagcagaaatgagaaccagcagtggggtcttattgcaacatagaaatatttgagcatgtatcactttaacaacattttggttaaggaaaaaaatgtttaagcattattcttgcccttgatagctatcttagtctcattttactgatttgtactgtattataaagaatacagttaaggcagttcttgattacaagtattatctgagaaatatttaaaacttgctgcctaaatttggtcattaaaatttaaactaagttgagaacttccttgtttgtcttatttgatactgagagactgcacagctctgtaaaaccaaagctgggctctgaggtcagagaaatatggatttgcagcccatctcagtgacttactaggtataatgtgtgaagaaagtctcttagcctctatatgtttcagtattcctggctgtaaaataagtaatactcattttacacagctgctttgaagactgagataatgaatattaggggactagtttacaataagtattcaacataacatggcaaattttaaaatgtgaaatatatacttactaaataagatggtggaaactgatgtatacttagaaaaggtcaagccatggcacacagcaagattgcatattaagaagaaaagaaataagtgaaaatttattactcaatgactggatatactaagtagtttttgtttctaacattattcatatataatatcataaatatgtcatttataaatactgtcattacttatatattgacagtcattctatcccaggtgacttaaagctgtcatttttaggcctttacatttaataaagcttagctcaatttttccttgaatatcaagaataaaaatcgtttttgcttgcgatttgcagcattccctagagatccagaaatcgagatgagtggtggcctcgtgaatgggagctctgtcactgtaagctgcaaggttcctagcgtgtacccccttgaccggctggagattgaattacttaagggggagactattctggagaatatagagtttttggaggatacggatatgaaatctctagagaacaaaagtttggaaatgaccttcatccctaccattgaagatactggaaaagctcttgtttgtcaggctaagttacatattgatgacatggaattcgaacccaaacaaaggcagagtacgcaaacactttatgtcaatggtaagtacatatgtgaggtatctacagtttaatacctgtctctttatcgtgtttgccaggcaatagttaacataaggttaatcgttaaaacctctgtggagaaaaaacgttactgaaaagaaatttcaaaataatgatgattgtaacaaatcaccctccctaaacttaaaatagtaactatttactggcttatgatgctttgagtaggcaatttaggaagggaccagctaggcagttattctgttcaatatggtattagctgagctcactcgtgcattttcagtaaggttagcagggctggctggtctcagatgacttcacccacatgtctggagccatatcttggatgacttggcctctctttctttatgtggtgtcaccctgaggaacagtagcctagatttactctccagagctcagtgtttcaagaaggtgtaaatgaaagcagcctcttcaaggcctgggtttggaagtcctacagtgttacttcttcttccacattcaattggtcaaagtgagtcatgaggccagcctagagattcaaggggtggaaaaatagaccacatcttttcacagaaggagattcaaataattcacagtcatgttgactctaccataaatggcagtacacactatcattgaccctcgtcattctttggttgcaaggaagtgtatactgaacttacttccattagaaaacaccatgacgtgtccatgttctactctatcatttggtatcagctaaagtaaatgaggaccaaaacctcttgtggtgaattatcaaggtttacaaactctttgagtctgctgaatccatagcccagttttgcaacattattaaaactctttggaactcagggcataataggtcaagctaacaagcgtctctgccttttcagttgcccccagagatacaaccgtcttggtcagcccttcctccatcctggaggaaggcagttctgtgaatatgacatgcttgagccagggctttcctgctccgaaaatcctgtggagcaggcagctccctaacggggagctacagcctctttctgagaatgcaactctcaccttaatttctacaaaaatggaagattctggggtttatttatgtgaaggaattaaccaggctggaagaagcagaaaggaagtggaattaattatccaaggtgagcagagtgtgagtaatgagttatccttgctagtaatgtttttggttatgttactgattatgagtaaagtctttgaaaacaaaatttttactacaaaagtgtgatgagggttttgaagagtttatgatgtttccaatgtatggagaaatctcctgaaattgtcttttctcatgaattgttacaagtttcttatcctgagattcttttaaactcaagtgaaatgcaagccttcaggacctgtgtcagaagttccagttacacttatgaggcaatggttatggtattgaaataagaataggaagaggaatatctgcatttgggattatgtaggattaaagctaccatatctggctgaattgaactctgagtggcaatctcacaagatggccagtagtatttgcttagaagcctaagctggcacttaagtcttttgcaaattctgagattatgagtagccatgactccgtcctttggttcatcagcctgagagcatggaagcactaaagtagattaagtcaacagatctaggccccttctctttaggatggagacccaagattgagaacaagacaattattagttcgcaggttgaagccatacggagttatgagcaaaatcatcaggtgatcaatgtggatttcctctatcccatcccttttgggtatcagggttcttttctttgccagggttgtcattttgtctattaccccttggcattattcccactaagatattagtgactttcttgttatctcaactcaataagatttgtattttagaagaagaatattggaaagacaatacacatccttaaaaaacagacaaacaaacaaaaaaaccttttggatggttgtcatgaccttggatggggaaagaatttcaaatcaacttacaaaatagaagaccttaatagggattaaaaattggtgatatggtacctgcctccagtggttgttgcattaatagagatgttatatgtcaagtacttagctcagtgcttggaacttaataaatggcagtagtattgttaaggatagtgaaaaagccacatctgtacagcttaacttcttgattgaagaatccaactcaaaactcagaaacctgtaaaggcctttgtacttcaaggaaattttttcaaaacagtattacaaaaaattaagtttctatttcacatctgaattctatagctctttatcaaacactgtatttgtcaattttcacactgctataaagatactacttgagattggtaatttataaaagaggtttaatacagttccacatggctgggaagacctcacaaaatgtgcaatcatggcagaggagaaagggaagcaaggcacaccttaacatggcggcaggcaagagagagtgaggaagtgccacactttaaaaccaaaagttctcgtaaaaactcattaactatcatgagaacagcatgggggaaacagcccccatgatccagtcacctctcaccaggttcctccctcaaaacgtgaggattacaattcaagttgagacctggatggggacacagagccaaaccatatcaaacacctattctttgtgctaggctgggtaaataattatattaaggaacatgaaagaagcataagccatgtactctcttagttaaaacatgatcatttccaacaatccagcaatgcttgacttctttacttgcccttcttaacatttaatgcaaacgctaagcacaaatagctccagggaagctattgttgatgtcgctaaattaatatggagttggtttatatttcactcaatcagggatgtcttttaaattctctttacagttactccaaaagacataaaacttacagcttttccttctgagagtgtcaaagaaggagacactgtcatcatctcttgtacatgtggaaatgttccagaaacatggataatcctgaagaaaaaagcggagacaggagacacagtactaaaatctatagatggcgcctataccatccgaaaggcccagttgaaggatgcgggagtatatgaatgtgaatctaaaaacaaagttggctcacaattaagaagtttaacacttgatgttcaaggtgagtttgttttgagtttttgttttcttggtaatagttcagaggttccaaggattactaagagtttccaatatttgatgaatgagttggcaaaatggagctgtggtttatttcttaaggattcttggaaaaatcaagcacagctgctttatcctataaagtttagccaggaagttgacattaatcattcgtgactgaggaattcctgcttgcttttttcagtttacaatttatcatttgtctctgaggtcttgcagttgctaaatgtttaaccatattttcaaaccttttcccgggaggttataaggaaactaaagaagtaggattggcacattgaaaaagaagggttctatccagaccctcttcctttctaccagaaggaaacactattttctgaacatggagtaactgcaattttctggattgactcttttcaggataataattgggaatagtaaacttgatcctgaacaacataaaaaaatctctcgactatcgaaaagcctcattaaaattccaacccacttgccatcctactctattctggtggacagagaaagagaggagcagtatcctcattggagaaacttcaggggccccttaatctcctaagccctcttgtgaatgcacagtaggtaggatctgctgatcttattggtgtaaacaaaatacatcagccttggctgatcagtatcacaccccttgcacaccaattagctgctattgtgtaatggaggccatacttggcggtggagtgcaaacaggactgcaaacaaatgccaagtcttaagaggtctggcacttggctattggagtgagcaatcacttgtcaatgcagagaaaatttgaatctacatcagaaacaggtaaaatttttgttcgtctacccaaatttctcaaaatggcaagccttaccgtatgtatgttttccatcttcacagtacctcctcaaaacatgagaatagctgtatagctatacatccatctagaaatgttaaagaaggggaaaacatcacgattatatatgaaacttctagtcatccacctgcagtgattatcctgaaaagaattgatctagccaatgaagttactatgtgttcaaagaagggaacatttactttgtatcatgtcactcaaaatgattcaggggtatatgtaatcagtgcttccaatgaggttggggatgattctggacagattgcaatctcagttatgagtaggttgaatttactcatccctattttctttaatccttaatgcctctgggccacctttaattaagcctagccctgggaaattggtcccctaacatttctgtaattcttttgttaattaattgtgaccttttaaagacacatcaaacctgcttctctactttttgactctgtctcacacacattgctttattttctaattgctttatcaaattagccacttacacagttgctactttttactcattatttaaatgaacaatcaaagaatattaagcgctcagctagaaactcatgcccccaaactgaatatagtttaaactagctaaattttaatgaagaccaaaaaatggatatttttctgggtattttgaactagatttcttttgcatttggctggattttttatttgtttcattttgtcttagcttgaacgtattccattaatagaaatcatcaggatttttaaaagatattcagtgtttatatgacaaatagaaaattgtatttgaaggttgccctggcaactaccttggcagcaaatttgtatttttctgccaatgcctgtggggaagactgaaaggcaaaagataatgtatattacattgaaaagaaagaaagaaaagaaatagaaatagtatttctgtttctcagcatgtcatcaatattgatgcctatccataatcatgttgatggacatcccattcaaatattacctttatactttgactagctcagctctagcaagggaaagtcaaaaagtgagacaattatcattatgcttagggtgaactgtttttcttcaataatttgaaaaagtgacttcacattatctgatgctcgtgattctttttacttggttgacctccagtgattagaaagctctggaaagaatgtagtaatcaccaaagtcagatctctagtttctgccaggactgagacaatgtatatgccacttagtgaaacttaatacttgtgtggtcacatgatgctgtgcaaagtataaacaggagtgagtcttcagtaaatgacacactatcttcttcagctgctcttataaagttaagatgttaagcagtatagcagctgtcagatgattttttagcagattagaaagaatactaattttaaagtttttgtatgctgttacctactgtactccatttacaactaagtggcaaaagcaaaatgtagagagaaaaaaatgttattagtgtttaaaaaatattgtttttggtgccaactaggccaagcagtgagtcaggtgctggctgttcagtgatggactaaaaagaaaatagatatacatgtcttgatgtaatttttagcttaggggaggaaactaaacttaataagtaattacatggataaatgtttaattaaaagctgtaataagggttttgaagggaaaacgagtgggttttgaaaatatattgaggttcttaatttagaatgagggagatatagattagagaatgcctctaagaaacatttaagctgtaacataacactgtccaaagaactctagtttatcaaaagatgatataaatgctgaagaggaaaaatgtattaatatgccctatttctgacataaaaaacatagaaacttctgtatatctctgagaaagccattggcaagattttttttttctcttacgatcttatttgtggcatttagctataatggtcacactctgaatattataaggattttcttagagaactggttagtcatttcaattcatggtcatcagagtcccagttctttagtagatatttttatttccccaagcaagtgcctctctccaattcctgttcttgcctctctccaattcctgttcttgttaaaaacttgtaccctcccttccattttacaactgaacctgaatctatttgaatccaagtttgtggaagccaacaactatcatctttagatccatcatgaccatagcaaccaccaactgattatttggataattcagacaaacatgcatcttgggtcctgatggtccttatcactgctttgattcccttctctttggagaactagttgtactgttataataaacatgtaactgttgttattaaatgctatctttttgtactagacattaattgcatccattttgttattttccaggaagagaaaacaacaaagactatttttctcctgagcttctcgtgctctattttgcatcctccttaataatacctgccattggaatgataatttactttgcaagaaaagccaacatgaaggggtcatatagtcttgtagaagcacagaagtcaaaagtgtagctaatgcttgatatgttcaactggagacactatttatctgtgcaaatccttgatactgctcatcattccttgagaaaaacaatgagctgagaggcagacttccctgaatgtattgaacttggaaagaaatgcccatctatgtcccttgctgtgagcaagaagtcaaagtaaaacttgctgcctgaagaacagtaactgccatcaagatgagagaactggaggagttccttgatctgtatatacaataacataatttgtacatatgtaaaataaaattatgccatagcaagattgcttaaaatagcaacactctatatttagattgttaaaataactagtgttgcttggactattataatttaatgcatgttaggaaaatttcacattaatatttgctgacagctgacctttgtcatctttcttctattttattccctttcacaaaattttattcctatatagtttattgacaataatttcaggttttgtaaagatgccgggttttatatttttatagacaaataataagcaaagggagcactgggttgactttcaggtactaaatacctcaacctatggtataatggttgactgggtttctctgtatagtactggcatggtacggagatgtttcacgaagtttgttcatcagactcctgtgcaactttcccaatgtggcctaaaaatgcaacttctttttattttcttttgtaaatgtttaggtttttttgtatagtaaagtgataatttctggaattagaa

SEQ ID NO: 131 - DNA, 41114 bp, Homo sapiens
ccgcggcagcgcagggcagcggggcagagcgcggctcccgcccgcccgccccgtgcgccggagccgggaccagcgactggacgcgacgggccgccaggcccgcaccgcctggccgccgcgatgtgcgactgcttccacatggtgctgcccacctggcccggaacccccggcagcggtgcgcccctccccgcctgcagcccgctcccctggggcgggtgggctacgcgcgagggcgcgcgccggggcgtgtccaggggcgcgcagtgcgggccttgggggcgggggactcggagacgcctgcgggactcgcgcgtggttctgggccttcccggccgctggagtctcttctcccatgcctcgcgttctacctgtccgtggctgtaggttcctgctcctctcccggcctctgagactgtctctgtcgctcactttgtttctcggtggctgactcgtctctgtcgctcactccctctgtcactcgcggtccctgtctgtctctccttctcgctcctgccccgctcctgggacgctgtctggtcgagaggcggcctcctgggaggtgctaccgcactctggagcagggctggtgtctgcaaggggcgtgaaagccggggccgccgggacccggggcacctgcaccaggcttgccctctcacctgctttgcgggagagcagccaggctggtccaggagtctgggctctccactttggtccggggcttccaggcagggctgggctgcgtctactgtgtggctgtgtggtggggtcgctggctaggtggaggctgtggcagggctaggcctgaggtctggggcctggtgaggggcctgaatggggtcaaagtcaggccacagggtcccgcagtgctgggcaagggaaagtgggtgctacctactggcatgcccccagggatggtcagtagcctccctctgagccgcaggctacggcatgtgtacctgctgctctttgtgtgtctgtccctgcactgggcctggttccggggcctgggtgtctcagcatcttggagggcagggctgaggggggcagggcagtcccttgggcgctgggtctatgctgctgcagctgaccacacccagggcattggcagccactggccagggggttgggctggccggcactggtgcaggctggaccccactccttggggaaaacaggtcaatgctaatggtgccgacaatgctgcaggtgagaggggtgcccctggcctgggcatgccccccagctgcagcaggcactaccaaggcccctcctgtggcctgtctgtctggtgcgcacttagggtgggaggcttgtctggggggctccagagcagggaggcccctacagcacctgcttcacggtgtcgcagatgggagcccaaggtgtttgggcacagcagcgggaggatgatggctccggtgggctggaggcccctggccccctcctctttcactatgactggccctgcccacatggctgcaggtcgacctcctcagagggagaagggcagggcccccaggcatgggaccactaccctgcccccagcttccctgcacagcctttctgctctgcttcctcctcactcacgggcacccagagactcccaagctgcagggtccaggaccatctcatccaccccctgcctccacagaggcttgtgctggcttcatggttcccagcccgtctggggcagtccctccctgtgtccagcctacggaaccatccgctcttagggaataaggtcagtggctctcgctggagctttggtaggagacttgcaagatcagagaccttgggagttctgtccagcacaccggttcccagaccctccccaaccctgcggcccaggaacgtgcattcctgacaagcaccctgccaactactgcctttcccagcctggatttggtccaggccttttccacctgcagtttcctctcagcaggctggagatgggcggactctcccctgctctcgtcttcctgtccagtccaaacctgccctctgcccgacacaccaggcaccagcccagcagggagccatctcctgggcggcttttgtgccgaggctgccccctggtggccatgctgggaccaccccacgcagcgctgccgactgtaacaccagccagttcactcccagtgggctctgggtgtcacactcttgcctactccaggggcaggttgcctctttcccaggggcagagctgggcccctgataactggggagacagggaacccctccccggccccggcccccaccctgcacctgctgccccggtgtggcctgagcacctcccacgaccccccaagaaagcaccaccgtgttgggaaggccccaggtggtgataccatgcgaagatgtgtgggtggtctcttctctgcggtgggggtcatgagatggctgggccctttcccaagaagggtgcaaagcaaggcagctgtggaggtggtctcgctgttctgtgcctcgctggtgccctcttcagggcctcaggctgcaaatgtgggtcaggacctcacattcggggtcaggagtgattgcagctgcctgtgctgctagctccacgcagccagggatgccgagtgacagcgcgggcgggtctgtcaccaccctggtgtctccctgactgggtcatctacactgggggagggctgtattcccattctgcagacaaggacactgaggctggggacagtgacgcagtgactccctgggctcttaggggccagagcagaatgtcgcacgctttggtcggtgacatgctgttctgacaggtgctggctctgccctgccccaccaggcagggtgaccgcaggcaaaggagcccctctgtagccgctagtggcaggaatgggccttgaggaggaggcagcagagggcatcctggagtgccctccagtgaggtggcctctcagaagccaccgacagtgatgctgtaagtgtgttcctaacaaccccagctctttccctggtggggaaacagaagctggaccaccagggagggaggctgggctgcctgctggcctctggctcctgccccaagcctcaggcagtgcccacctggtgcagctcagggaagggggtgaggctcagaagtggacaggagggtcaagcccgcagagcctccagttccaatgccccaggagcccgctccctcccggccttctccatgcccaggaagctgagtgcccactcccatccgggctcgtcgtggctgggcctacaacaggaatgccctcattgccttctctccatttggccaagctcttctgtcctgggctgggctaggagctgcctcttctgggaagtcccctgggttgctgggcccactcccagctctcccttagactctggcccgctctgtgtccttcctcttgtgacacctatgcggaaggcctctgtgtttcaggctcagctaggggctggcttggccaggtgtggagaagtataggtgctggggaggaaaggcccccaagccccagcaagtggggggcactggccatctgggggtccctgccacccacttcaggagtaaaatgccacactctcccagcttggtcttccggctggcagagacggaccctgcgctcagggatggtgtgagttgtgggggtgcttccccgtctgtctggcggcctgttcacccatccttctgggtctcaaagccaccccgggaaccctgggacctgggaggtcatagctcagcagaggaaggatccacccattgttcagtcaacaaatgtgaatcccatttttgtggccagtgcagccttagggggcacagaagggccagagagggctccctggaggacaactggcccaatggagaccgggactggtcatgaaaaagaagcggaggcaaagcagcaggagcctgcagaggctgagggcgaagtcagggacctgcaagttgttcaacccagtgcatctgggacggggtggggtgaggatggagaggtggcagcgtcagctgctggagggagggctttgtcctgagggcaccggggagccccataggtcttagggcagttttggtgggaaggaagctgctccgtgggggatgtggaggccaggttagctaagggagcttagcggaggcttaactggacacacaaggaggacggggcatgctcctctgctcccctccacccgctctaagggtgacgggatccccagccacgctgcgagcttgagggtgtctccaccaggccccacctgcactcagcctgggcctccagatttccctttatttttctttttttggaagtcatcggctggccgggagtcaaggccttccttgctcggataaatatttaatagtcagaagcactttctaaaatggaaacatggagctgagcccaggaggcaggggatggggaggggctggggcgggaggcggtactcccccatccccgcaccccacagaggccaggcagaggtttttgcagccaccgccctcccctcccctccggctgcgggtccctgccctgccagctctgctgcgcactcggacctgctgacccaatgtgtgcttgtgagggtgggagtggcatcggggcctcctctctgcagagctcttgggagggactccttcctgcaggggtggcggtggtgggaggctaggcaattgcccaggctgttccaggcaggagtccggaaagggatctcaagccacacccctgcctggacgctgctgagggtatagccaagcaggggcagctgggggtacccgggatgtggcaggggcaggacacttgggggacccttactgggctatgtccgtgtgagccctgccggctggaggggctgtcaggtgatggcgcctgggtgggcaggaggccccatgactcacccccaccaggtggaattaaggcccctttgtttagggccacagccttcggtcctcgccctgctcctgctgcttggcaggcctggctcctgggtgagccagcaccgcgggctccttggtgacacacgccctgagaatgccgagcttcacgccttggcctcctcccggctgattcaccatccgctgccctcagccctccctggcccccgccagcagccgagttcccatggcgactcctagctggtcctgggtcctagcagctctgagccaggactagctgttcagtgcgcatcacgggacatgccggatggcctaggtctcagggtctgtgatgtggtggcttagcagagcccctgcttgccgtccctccagctgatcagacacctgcctgaccactgagtcccaccacgtggtgccaggggtccggtaggtggggcccccgggaactgaggcaggtgagcaaggccctgcccagcacccgcctgctggtggtcaagtgtgcctctcttgggactgggtagcaacaggggcaggtgtgaagcatggctctccagctcttacccttcccagtaagtggccccctgagccagagcccagggcctccagcctgaccccatcccttgctgtgtgtctgcaccgtgctgtgggcacccaccgccaggggctctggagccgagggctcggttctgagtgcctggcgggggagcaagtccaggatctgagctgggagggtgccccaggcagagccagtggcacgtgcttagagtctggagagggcctggggcagggtgtggtgcgttcccatggctgtccgcgttggggagggtgcaccaggaggagatctccgtcatgtgttccagggcttggcggaccacactggccgcactgcagcgagggtctgggaagggcttgcgtggccagcgctgtggccagctgtgcagggcacctccctctggctgctgtgaggtgggcgtagctggggtgggggccccagcaaaggctcttgcgggggtcagtgctgtgtctggcatgacggccccgctctgtgccagcgtctccttcctgtcccactccagcaggctgggcctctgggtacggcgctgactcagccagccctgccctgcctggctgagtgtgggtgtcaggtggtaaacagtaaacagcgttcccaggtgagagctgtctgggagtgtccctggagcagacgtggccagctttcctgcctccgtgtaaatagagtcgttttctatctttgtgaccgttaggtttttgtgtcagcctttttagggtattgcaatggggggaggcccagaaggggcctggaatcaggtccccacctttcaggcctgaggagcccctgaggcctctcccaccccatttgccggcaagtgcccctgccctggggctgggacagagccttccctgcccttgaagtcctctggcctacttgaggaccccttctctgtgtgcccacctcaggccaccctggcatcccgtggcgggggcagccctctcagctgcaccttcccacctcttcccatgccgttggggcctggtgcaggtgcaagccgttccatcgctgacctcccaggctgggtctgacccctcgctgcccctaaggcctgggctgggcctcggctgtgtgggcctgctccagactgcctgttggaggcacgtccacacccaggctatgggcacagggctggcacactgggatcccaggggggctacacgtagcacagctggttgagtcctgctggagcctcctggctgcccagagcaaagaggagtgggggctaagggcccagggtgcagcagggtgaggtgaccaggaggtgggccaggcagctggagctctggatagtgggggacttggggtcatgggactcaggtgtttctcagccaccacttgtattgaaatgacggggaaggatgggaggcttgttaaaaaaaaaagctaggccagtgcggaggctcacacctgtaatcccagcagtttgggaggctgaggcagaaggatcacttgagcctaggagtttgagactagccagggcaacacagggagaccttgtctctacaaaaaatttaaaaattagccaggcgtgctggtgtgtgcctgcagccccagccacttgggaggccaaggcgggaggatcacctgagcccatgcgtatgagatcagcctggacaatatggtaggatcctatctctacaaaaaatttttaaaattagccaggtgtggtggcgtcacctggagccccagccacttgagaggctgacacgggaggatggtttgagtccaggagtttgaggctgcagtgagccatgatcgcaccactgcactccaacctgggtgagagagagaccctgtttcaaaaaatgctgcttcctgagccccaccgcaccctgcttaccagataccctggtgcttcgaggtgtggtggccgctgtgagtttgggctgagcgggctgaagggaggccagggtcggctgccctgggggctcaggcaggtggcagatgaccaggccccaaggtcactggcccagtgaccatgggggcaggcccttaggctatgcctctcctcccttctgggccagcctctgtcctggcccccatagggaaactgagacacagggtttgtgcagagcctgcctaggagggacctgcctcaggcctgtgtctgtccacacagcaggacctggcgcacactaaggcactcaccagactgggctggctgtgtgactcagagcggtctgttcctctgcagtcagctgctcaggctgggggtgggcactcagggtggggtccccagctccaagaagctgagtgagtgttgggggctggccaggctcctggcccatcaggggacccgcccactccctctggtgggatgtgggggtcctggcagggtccagagccagccctaggagcaggcagaggcgggacaatggggggaggagctgtggagggaagaaccgggcgtggcagggggaggtggccagttgggatcttcgcttctgggccagttgggagagcgtctgtagcttccttggtaagtggctcctgtgtccatgtccggacacctgcttgcctcactcttccgcgggtctgtgggggccagcaggccaccagcaaggggggctggaggaacagagctgggctaggcatcccccgacctgcagctgacagacgggcaggggtgttagttcaccgtggctccagccagggccagcgggctgggcagggatgtcagggagaaagccccggagccccttctcctgggtcctggtccctggggtgccggcggagcccaggccatacaaggtgtgtggcaggacaccaagctgtgggccctgggcaggtaggggacagtggctcttgtttccaaggagcctgggtgtggggggaggtgaatgccaagagcacccacattcagggcagccgcaggtctgcaagtccccaaggtgggcgtggggcctggagaagggtcctcagatgaccgtgtgcttgcttggtgcacaggggccctgggtggctgtggagggtggttgcttccaaaggccaggtttactctcctgggggtgcccgaggtgggctgtgggggcctggggcgatgggtagctccatcacagggtcacactgccctggacgtctgtggggccggcctttcagcccagggaaactggctcaggctagcccgcctgggatggatgggagcatggggctgttccttttggctgccaaatcccttggagaggtggcacatgtgctaccctgtgcctcagtttctccaggagcagaaggagatgaactgggcccacctgctgccctcccatccccatcaactggctcccaccctcaggcttaccaggcttttccaggagatctgacaagctccttcctttttcccatgcactgcctgcactagcatttattatgcacctactgtgtgccaggctctgagtgcttggtgagcaaagtgttctggggaccagggagccggcagtgtccagaagccatggcagggtggccaagctcagtctgtgaatttgcccagcagagaagacagcctgggaaagcccagagagagagcgcctgtggcccaggcaggcacagtgagggctggagaggctggggatgtcggctagggctagagcaggcacggagaggctgccaggccagtctgaccgatggatggcaccagggagctacgaaaggttgtttcgggagagggtgatgtgaatagcctcacgggtgcagctgggctgcagtggggaatggctgctggatgggcaaggagcccagctcccaggtctaggggactgagtctggcttccccagccctcctgcagccttggaggcagacacagaggcaggagcaagagcctgagctcatcccgagagagttatctcaagaagcatcggggaggggcgggggatgttgctcagggaagtctgaaggtctcatgacagtcagcccgcttggcaccttcttcatgaagttccacgactgggtgaggcccaagtgcggccggctgtgtgtgcctgtgtctgggtgggcaccaggtttccagcccgagggcagtgactcccacagggctcccgcctccatggcctcactctgggctgtccatgggtgttcagagggaggagcccaggccagacacacaagtgcacacacgccctagcacctgagcacgtacatcctgtgagcacacacgtgtgcacacacacctgcaaacctggagtgggccattcgttcctcccacccaggatggacttttccggccactggagagccagtctcctccctgccagcccccagggccctggggacttgcaaatgcacccaaccatgccctcccacctggaggccagagatggggccctggggctgccagtttagaggcaaacttggattttgtttaagcaaaatccacctcctccccccacggacctgttctggaccctccaagaactctcatttagctggtggctggtgggagtcctcaatctggacccagctgtggagcaggggtgttggtgagcctctgccacactccccgcctgtgttccttctcccctcccgctcggcccctccccgcctcccggccaggatctgctcgtcccccagacacactgcctgaggccccgcctgctcaggccctgcgccaggatagtccagttctcggggaggcagcttttctgggccagggtgggtgtcctctgcggctttcactgtggtaccacccccacctgccctggcatgcaagggactgacctgggtcccggggtccctccacaaggttcaagttttcacccgcaggaatgttaatggtagtgttgaggccagggcgctggggggcccggggagtgggggaagggcattggggaaggaaccaggtgccaacggcctgaccagctgggcctggctcaggcgagtcacctccacattctcctctgtgaagtggggctttggtgaccgtcaacaaacagtgtcatgattcaggtgatggggccacttgcagagcctgtctgggagaaccggaggccgggcgggcaaaggcggcctcccctgcgctctgcggccgaggcggggcttcctcaggagctcgggcctgggaggcggtgctcttggcgggggactgggatactgggggccttcctctctctcccgactggcgcgggtccgaggccggtagcctggctgcgcagccttatcccgaggcgggcaggatttcccccttcctgtttgtgttcctgggccaggctcctgccagcccagtgactggaggggtccccactgcgcagctctgtggccagaggcaggtctgccgctcgctgagcctctgcactccatccccactacaggcagtgtaggaacagccgctcccagtgcggtggctgagggtggggctggggactgtcccgcgtgggccagtggcaggaccaggcacgagggccagcaggagcagggctggtcacgtctcctcctccttcccccatgcaggttcccagcacagggtgtgcccagggcttgctgtcgacaccctccctcaccggccccaacacccacaagactaccctggagagatttgggagtgcagccggctgtgcccagctcaggggcccttgaccgtggtgcccacccccagcccagcagacctgtgtttccctgcctggcgagtcccttctccgaggagttgccctcctgaccctttcttgggcctcacagcagctgccccccacccccaacccatccaggctcctgccagctgggtggggctttttggctggggaggctgcggagggacggggaggcggctgggtttctgggcagcctcagaacacctgccccaccctgagtgctaggcagggcctgggacacccggtctccgaggcagtggagcccctccccactcatgaccccagctgcacctgctgccaggggagcagctgtgggccaagtgacccagggaccctcctctgcccccagccctgctaggtagttgccccagctccacacctactggctgggtccccttgggtaagtggctcccctcccccagcctcagttttcacatatgttacccaccttggggattgagcggcagggtctgggcagagcaggaagggaaactgaggccagagagtggcttacctgccattgcccttggcttagcggtgggcaggctctggccagattcctgtccctttccttggcaccaccccgtcccacgaatttgttgtgggtctggtgtggctggagctccaggcagctccagaggggctggggtggccccagctggtggtccctcagggttgtggggtgcactggggagccctggcagggccacgtggagggagtgggagggggcaggtgggcaaggagtggagggtttggcagccatctgggaggcagagcggtggggctggccaagttctgtctgtgcaggttgggggtgcgtccaggtgggagcagcaggggccctgtcaggtggtggggcagtgtctgaatgcaaaggtgagtgagatgggcccaggtggccaggacagagctgtgcagaagggagacagggtcttgccccttcactgcctggttagggagaaggggcctgtggaggagatcgtgttgtggggttgccaggggtacaattcttgggctgacaccgtgggcaaggctggtttggcaggtgggggaaacggaggttgtggctctgctggggggttatggaggccaggggtctgggcctggcccccggagcagtaggaaggtggcggggccgggatgacgtgggggtgagtgttgatgcctcctggcactgacccagccctgcctgccctcacctcctgcccttctcttccttcgcttgagagaacctcctccaggagacaccatcctccagccctgccaggcctgagagcagagccagaggggacctgggctgtgagccatcttgcagaagggcaaggaaaggcccgtgaagcggtgagggagtggcaggggcccgcgcaggcagaggtgctcttgggatgagcaggcatggccctgggggtgcctctgcgggagcagtgtctgtagcccagcaacccacagtcagggcaggcagggtggtccacatatccatgagggaatgaaagctcagagaggggatgagcttgctcagggccacacagcacactggccagaggagcagccagacctagaccactgccgggactgggcctccccatctgtcttcgtgggacagtccccaaggccaggacacctaccgcaggggacagggagcagctggtccccgaggccagcacaccaccccaaaggatagggacatgctccttcccaatcagtgtcctaccagcaactgggtctggggcagggatgggggccttagttctgagaccctccttgtcactgcaggagggaggccctggagcccaggccagggcgccagagttggcgtaagattggtactgtttcttcttggaatatttagagtataattcagagtggggttgagactggagtcctttttgtgggacggttttaaataagggatttgattttttcttttcttttcttttcttttttttttttttttttttgagacagagttttgcttttgttgctgaggctggagtgcaatggcatgatcttggctcactgcaacctctgccttctgggttcaagtgattctcctgcctcagtcttcctagtagctgggattacaggcgcctgccaccatgcccagctaatttttgtatttttagtagagatggggtttcaccatgttgatttttaaatcgttacaaaaatacttggattatccatcggggcgtccgtcctatcttttggcttccctgggctacattggaagaagaagaattgtcttgggtcacacataaactacactaatgatagctgatgagctaaaagaaacaattgcaaaagagtgtaataaagttttaggaagtttatgaatttgtgttaagccgtattcaaagctgttctgggccacatgcggcctgtgggccgtgggttggacaagtttggttcttcttgtgggttttctaggaatatatccaatcaatcgaaattttcagatttattagtgtaaagtttataattgtgtttgattttatatagaattctaaaattttttatggagaaagggtacaaaccatggcacacccaagtaattagtcctctccaggagaccctgtctgcctgctccccctggtgacttcagccctaggtggcctgagcctgactgtgagctggatgtgacgggctcccccggtacgagcgctttttatatctagcttctgtgtctcaaccttgtgtttgtgaacttcatccacgttgcacataggcatagtttataccatatactgttccattggacaaatacctcgcatttttttttattctactgttgatggacatttgaatctctggtttctgggtgctgcagattatactgagatggatgttcctgcatccatcttttgagggacatatgtgcgcatatttcttggctctgcccctggctatgagttgctgggccacagggtaaggctctaccaggctgtttccaagtggttgcgccagctgacccccaacccacaccaggatggagttccagctgccctaggccttgtctccaggtggtctgcctcgacttttccatttcagccattctcctgggagcatatggcacctcgtggttttgttagcattgcccagatgactagaaatgctggccatctttccatatactaatcggctggttgaatatcctcttctatgagctacctttccagtgttttcttgcccatatttctatcgggttgtttgtcttttggtttgcaagaattctttgtgcattctgggttggaggcctttgcttggtaaatgtattgcaggtatctttgcccaatctgtgttttgggcaaagatagctgcaatttatcgatttcatttcctttggatatatacccagtagtgggactgctggatcaaatggtagttctatttttaattttttgaggaaccatccatagtgttttctatcatggctatactaatttacatttcatgcccttagtggtgttttttgatgaacagaagctcttaattcttttctctctctctcttttttttttcttttttttttttagacggagtctcgctgtgtggcccaggctggagtgcagtggcgcaatctcagctcactgcaagctccgcctcccgggttcacgccattctcctgcctcagcctcccgagtagctgggactacaggcacccgccaccacacccggctaattttttgtatttttagaagagacagggtttcaccgtgttagccaggatggtctcgatctcctgacctcgtgatccgcccgcctcggcctcccaaagtgttgggattacaggcgtgagccaccgcgcctggccagaagctcttaattttaatatagaccaatatctgtcattttttgtgtgttctgtttaagaatttttcccctactccaaaagtaatttctatttattttctagaaattttattgttaagcctttaattttggatctgtaatccacatgaaattaattttctctggctgaggtggggcgaagattaatgtttttccatatggatatcccatggatcccaggccatgtgttgaacagatcatcacagctttgtgtacgtgtgtctgtttctgggatctctgttctgttccattggtcttgatttgcattttcctgatgactgaaaatgttgagcatctttccttgtacttattgaacactcgtacatcttcttttgtgaaatgtctgttcaaatctgctgcctatttttagctgagctttttctcttccgttgagttgtacacaggctccatgcaagtcctttgccagatacattcactgccttttcgttttctgaggaaaatgaaagctcttaaggccagtgttttaaattatgagaacttaaatttatcagttttcgttctatgatccttaccttctgtatcctaagaaaactttgctgccctcgaggtgttaaagaagttctcctatattttcttctagaagttttatagtttttggttttacattcccctctatgattcatttcaaattcattttcatgagtgatgggatggaagggtccaggtttattggtttcccagtaaatacccagctgttccaggaccattcggtgaaaagactttgctttctgttggaataactgggctgctttgacaagaatttggccgggcatggtggctcacgcctgtactttgggaggccaaggcaggtggatcacttgaggccaggagttcaagaccagcctgggcaacatggtgaaaccccatctctactaaaagtaccaaaaaaaaaaaaaattagtgaggcatgatggcgcatgcctgtaatcccagctacttgggaggatgaggcaccagaaacgcttgaacccaggaggcagaagttgctgtgagctgagattgtgccactgcattccagcctgagcgacagagtgagaccctgtctcaaaacaaaaccaaccaaccaacaaacaagaatgaattggccatgtaagtgtggggctgttctggactttgttttctgttcactgatttgtgtttctgccgcactgtcttgattccactgggggtcagagaagagaactcggatgactgaagttattttaaattcgtcaagacaggtttctgagccagcatggggcctgtctcagtgactgtcccctgtgcacctgagagcagcatgcaccggctgctgtcaggagtgttctcccagtgccagtttggtctcgttggttgatgggtacttcaagtgttttgtatcttcccctattctactttgtaaggttatcatttcctaagagtgttagaatctcctattgtataataattgtggatttatttctcctttcagttttgccagtttttactgcagtgtttcaaaaaggagatctaggtgttttttggtttgtttgttttttgagacagggtcttgctttgctgccccggctggagtgcagtggcatgagcttggctcactgcagctttaacctcctgggctcaagtgatcctcccacctcagcctcccgagtagctgggaatacagatgtgcgccaccatgcatggctaatttttaaatattttctaaagatgaggtctcactgtgttgcccaggctagtctcaaactcctggcctcaagtgttcctcctgcctcggtctcctaaagtgctgggattacggcacaagccactgtgcccagcctagcattccattttggttccactattggcttattacctatacatctttttatttttttaatggttgcattatgctttataccctgaatatttaacttattacagtataatttcaagtaagattgtcctactttaagtataatgtaagatcttcacaacagcaactttttttttttttttaagatggggtctcgctgtcacccaggctggagtgcagtgacgcgatctcggctcactgcaggctccgccccccggggttcacgccattctcctgcctcagcctcccgagtagctgggactacaggcgcccgccacctcgcccggctatttttttgtatttttagtagagacggggtttcactgtgttagccaggatggttttgatctcctgacctcgtgatccgcccgcctcggcctcccaaagtgctgggattacaggcgtgagccaccgtgcccggcccacaacagcaacttttgcactccatccccatcctgtcatatgctttacttctatatttgtaaaattctaagatacattttattttatttgtttttttttttggagacagagtcttggtctgttaccaaggctggagtgcagtggaacaatctcagctcactgcaacctccacctcctgggttcaagtgattctcctgcctctgcttcttgagtagctgggattacagacgtgcaccaccctgcccagctaatgtttgtatttttagtagagaggggtttcaccatgttggccaggctggtctcaaactcctggcctcaagtgatctgccctccttggcctcccaaagtgctgggattacaggtgtgagccaccgtgctgacttatttttgttttatacagttaattacctttttcttttacagtttcattgaggtacagtttataaaccatagaactcacccattgtaaatgtacaattcaatcattttactaaccttatagagttgtgcaaacattaccacaatccagttctggaagacctccatcaccttccaaattttctcaaccccatttacaatcaatctcccttcccactcccagccccaggcaatgccagcttaattctggtaaattatagaaactttggtccagggtacacttgtgcctcagcatccatgagggattgcttctaggacctccctcagataccaaaattcatggatgctcaagtcccttctataaagcaatgtagtatttgcaaataacctacatacatcttccctcccctatactttaaatcatctctagattacttataatacctaatgcaatgtaaatgctatgtaaatagctggtatactatattgtttagggaataatgacaagaaaaaaagtctacacgtgttcagtacaggtgcaatttttgggagaacatttttgacccaagtttcattgaactcaggatacagaaaccactgatatgagaggctgactgtataccctctcctcctactcctttttgctattattgtcacgtatatactgtatctatatatgttataatcctaacaatatggtgttagaattgttgccttatataagtggttcacagatgattgtctgtcttctaaatccagcctcctttttgttttacaagtaaagttttgttgaaacagttttgctcatttatttacatattatctataatctatagctgcttttgtactatggctgcagagttgcaacagagatcatgtggcctggtaagcttaaaatatccactatattgcctttttcaagaaaagtttgtcaatccttgctttatacaatcctctgtttttgaaagaagttaagaaataaaatgaggacaatatatattcatagagtcttttatatttgcctgcatagttaccattttctgcattctccatttcttcctgtgcatttgacttagtgtctggtattagttcctttcagtccgaaggacttctttagtatatcttgtaaggcagatttgctagcaatgacatttccaagtctttgttcatttgggaatgcctttatttttcctttttttaaaatttaaatttttatttttttgagacagagtcttgctctgcctgactagagtgaagtggtgcaatcacagctcactgcagcctcaacctctcaggcttaagctatcctcccgcctcagcctcctgagcagctgggactataggcatgcaccaccatgccccgctaatttttaaaaaaatttttgggccggacacggcagctcatgcctgtaatcccagcactttgggaggctgaggcaggcggatcacgaggtcaagagttcaagaccagcctggccgacatggtgaaacccgtctctcctaaacgtacgaaaattagctgggcatggtagcgcgtgtctgtagtcccagctactcgggaggctgaggcagaagaatcacttgaacctgggaggcggaggttgcagtgaaccaagatcgtgccactgcacttcatcctgggtgacagagtgagactccgtctcaaaaaaaaaatttttttttgtagagatgagatcttactatattgctcaggctggccttgagtttctgggctcaagcaatcctcgcacttcagcctcccaaagtgctgggattacaggcataagccagcatgcccagactattttgcctttatttttggaaggataggttgcttgatatcaaattcttcgttgacaacagtttctttcagccctttgaatatattgttccactttctcgtagcttctatggttttgatgtgattcaggtgttagttgtatttttgtgcccttattatgtgatggggccctttctcttaagcattttgactgtgacgtttctaggtgtggatctctgtgtttctcctgcttaggtctggtcgcgcttcttggattctgcagattgttttcagctatcacttcttcaactctctcttctgcctctttatcttatggttaatgctctgagactctgtttttcttcaaacaatcttccccctgaccccgttcttcaaattggttaatttatattaatctacaagttgataattcttctggtatctcaaatctgttggtgaaccccagtagtaaattttcaactccagaatttttgcttgcttttaaaaaataagttttatttctttatgagattctctcttcattgagccattgttaacatattttccattaattttttaaacatgatttgtttttgtgttttgaacaaacttttttttttctttttgagacggagtttcactcttgttgcccaggctggagtacaatggcacaatctcggctcaccacaacctccgcctcccaggttcaagtgattctcctacctcagcctcctgagtagctgggattacaggcatgtgccaccatgcctggctaattttgtatttttagtagagatggggtttctccatgttggtgaggctggtctcgaactcccaacctcaggtgatccacccgcctcagcctcccaaagtcctgggattacaggcatgagccaccgtgcccggcctgaacaaacttttaatagtttctttgaagtctgtattaaacccagcattagtagacatttagagacactttccattcactgctttgtttctcagtatggaccatacattcttgtttcttcgcgtaacttgtaattttttggtggctgctggacattttagataatatattctggcagctctggattctgatcctcccagggtgtggttatacaataacaaacgccttgtgtttgtttagtcactttcttggactaaatctgttccaacttggaataagtccagtctcaattcactgctacctgacgtgatgcctcagcctctccagcccattggctatagatcttcccccagcccctgagtttgctctccgatccagtgtccaggaaaggactatgacacctccacagtgtacatacagtcctggctccctcccccgggccccgatctgctcccccagcctgcttgtctccactgacagccactctctctgcagtgtccggccgtcagctgcagcccggggagccaggtgcagaaacggaagatgaccactctgtaagtgagagcaggaggaagtgtgtcctcctcataccctgcccccattctccctgggccctgggagaaccgagtggcaaaaataactggattctctcccgtcaggtgactgaagggcctgcggatgagggcattcgaccacggccgcaggggtcttcacctgtctacgaatacacgactgaggctgccgactttggactccaggtgagcctgctgggcagagccccacaggcacccaggtctcctcctgcatcgccctgtgtgggcaactcacgcatgtctgttcaaccttgctgccctgccccgctgcccactgggcagtgcccactcagatgtcctctcagactcctctgtgcccttgggtccctccctgtggccggccagggcacagtgggatggaggtgccctgcagctcttgtgagcatgcgtatgggctgatggggacaggcctcatgttactgtgtttgtgtttcaggggcacagggtgtgtgcatccctgcacctgtgtaacacactcatgctgtctttggggacagggccccatggctacctctggagacaaggactcggggaagggatcagaggaggcatgtctatgaaaggattcatttttgtacaatttgaatttcttatctccctccatacaaaactccagttgctgtggggcttccctatgggcgctgtgggctgtagggtgggtgctgtgggctgtaggctgggccctgtcgggaagcaggaaggccgagagttgccttttctctgtggatgtgcctggaggaactcggctgcctctgcacacagctgtgtgttggaagttctgggcccctctgaagggagggctcctggtctggcaccagcctacctgtgcccctccctgtccctgagctggggcaggtgcctaactcccaacacttgtggctgcaggaagacgcccccggcaggcaaggttctgctgggagacggagatcctggtggaagcgagattcaggggactcacggacatttttcaggatgagtcgtccagaggtgggtacagcaggagctgagggtcacagaggtgtgtcggtcctcaagggatccagccagagagtccgaggtcagagcaggcaggggaggagcaaagaggctggcagtgtgccccgtgccctggggaggaggggtgttcttgtcccccttgtcaggcctggggaagggcaggggctccagaaggctacatctggtcctggccctctccacccctccctggggtggagtctgatgcatagccaagctcctggccaggtagacctggctgtacagacctcgattttctcctccgtgcaatggggcagtgctggtgtctgttgcatattcaagctgtggggctgaaaaggccagtcagcacccaggccatggaactatggaaggtgctagactctgctagcacccaatgatgagggcactctgcctcttaagcaactagtttttttccttggaggccccagcagtccaagagctctgcaggacacaggccccatcctgtcccaggtctcgcaggctgcacccaatgtcccgtattttccttggcattgctgtgcttccttgtcttgagcatcaggtgccttgcacacaactggtgcttcacgcgtttgtgaagaatgcatgaaggagctgaaaaagagaaactggccacagggaaagcagaatccgttctgcgctgctcctggtgccctgctgggcctggtggcatggacaggctgtgcctaagtcctggcaggttggggtggggacaagagttctggcaggttccagctggcttcctccagagctcagagacagctacctgagcccacctggtgggtaccctactctgctctgtgttgtctgggctgatggaaaggatggtggggtgcccatcctctggagacacaggccccagcagggatgcttatggtgggactggcacatgctcaccatggccctgatgtgcttctgctccaggctgtccaggaggcaacagaggtgacgctgaagacagaggtggaggcaggagccagtggctacagtgtcacaggtggtggggaccaggggatcttcgtcaagcaagtgctgaaggactcctcagccgccaagctttttaacttgagagaaggtgccatggcagttccatccctggggtcaccattctccccaccaggatgggagggacctggaggggggtattgaggggtaagaaccacacctggagcttaggatgacctcctcacgcctctgctcaacagcttgaggctgggatcacccactgcatctagtaaaatgggggaccccatccaccttgcctgtgcctgaggcactcagtgggggactggtggggcagactcagtgggattccccctattcatgtccccgggaccctcctcgccagccaaggcaagacagcagaccccgtctcattcacacacccggccctggggctgctctttcttggtctaggggatcagctgctcagtacaaccgtgttctttgaaaacataaaatatgaagatgctctcaaaatccttcaatattcagagccgtacaaggttcagttcaaaatcagacggcagctccctgccccacaggatgaagagtgggcttccagcgatgcccagcacggcccacagggcaaggagaaggaggtgagaccactatgcccggggggcagggccccagctggcttcactaccctgctggctgagcctgggaggggatagcactcccactccatctgtccctgggccagggccccaggcttcttggactggcaccaacagattccctctccctatgtttcaggacacggatgttgctgatgggtgcagagagacccccacgaaaactctggaaggagatggggaccaagagagactcatctccaaaccaagggtggggagaggcaggcagagccagagggagaggctctcttggccaaaatttcaatccataaagagcaagcgggggccgggaccccagaggtcacacagctcgtcagaggcctacgaacctagggacgcacatgacgtgtcccctacaagcacagacacagaggcccagctcacggtggagcgccaagagcagaaggcagggccgggcagccagaggaggcggaagttcctcaacctcagattcaggacaggctcgggacagggcccttcatcgacaggacagccaggcagggggttccagagtggggtgggccgtgctggggtcctggaagagttggggccctggggtgatagcctcgaggagactggggctgccacaggcagcaggagagaggagagggcagaacaggatcgagaagtgatgcctgctcagagcatgccattgcccacagagctcggtgaccctagactttgcgagggaacccctcaggaagggggactcagggcagccaggctccatggaaagaccctggaggggcaggcacaggagacagcagtggcccagaggaagcccagggcccagccaactcctggaatgagccgggagggtgaaggcgagggactgcagagcctggaaatcgggatcgccagactgtccttgagagacacaaccgaaggaggcacacagattggcccaccagaaattagggtgcgagtacacgatttaaagacaccaaaatttgcattttccacagaaaaagagccagaaagagaaaggcgccttagtaccccacagcgagggaagagacaggatgcgtcctcaaaagcgggtactggcctgaagggtgaggaggtggaaggagccgggtggatgccgggcagggaaccaaccacacatgcagaagcacagggggatgaaggagatggagaggaaggactacagaggacaaggatcactgaggaacaggacaagggcagggaagacacagaaggacagataagaatgcccaagttcaagataccctccttaggatggtcgccaagcaagcacacaaagacaggcagagaaaaagccacagaagacacagagcagggaagggaaggagaggccacagcaacagctgatagaagagaacagagacgcacagaggaaggattaaaagacaaagaagacagtgactcaatgacaaacacaacaaaaatacaactaatacacgatgaaaaacgcttaaaaaaggaacaaattctgacagaaaaggaagtggccaccaaagacagcaagttcaaaatgcccaagttcaagatgccattgttcggggcgtcagccccaggcaagtccatggaggcctcggtggatgtgtctgcgccgaaggtggaggccgacgtgagcctcctctccatgcagggggacctcaagaccactgacctcagcgtccagaccccttccgctgacctggaggtccaggatggccaagtggatgtgaaacttccggagggccccctgcccgagggagccagcctcaaagggcacctgcccaaggtgcagaggcccagtttgaagatgcccaaagtggacctcaagggccccaagctggacctgaaaggccccaaggcggaagtgacagcccccgatgtgaagatgtctctgtccagcatggaggtggacgtccaggccccgagagcaaagctggatggtgcgcggctggagggggacctgtccctggccgacaaggaggtgactgccaaagacagcaagttcaaaatgcccaagttcaagatgccatcattcggggtgtcggccccaggcaagtccatggaggactcggtggatgtgtctgcgccgaaggtggaggccgacgtgagcctctcctccatgcagggggacctcaaggccactgacctcagcattcagcccccttccgctgacctggaggtccaggctggccaagtggatgtgaaacttccggagggccctgtgcccgagggagccggccccaaagtgcacctgcccaaagtggagatgcccagtttcaagatgcccaaagtggacctcaagggcccccagatagatgttaagggccccaagctggacctgaaaggccccaaggcggaagtgacagcccccgatggcgaggtgtctctgcccagcatggaggtggatgtccaggcccagaaggccaagctggatggtgcgtggctggagggggacctgtccctggccgacaaggacgtgactgccaaagacagcaagttcaaaatgcccaagttcaagatgccgtcgttcggggtatcggccccagggaagtccatcaaggccttggtggatgtgtctgcacccaaggtggaggccgacctgagtctcccctccatgcagggggacctgaagaccactgacctcagcattcagcctgcttctactgacctgaaggtccaggctgaccaggtggatgtgaagctcccggagggccacctgcccgagggagctggccttaaagggcacttgcccaaggtggagatgcccagtttcaagatgcccaaagtggccctcaagggcccccaggtggacgtcaagggccccaagctggacctgaaaagccccaaggcggaagtcacagcccctgatgtggaggtgtctctgcccagcgtggaggtggacgtcgaggccccgggagccaagctggacagtgcgcggctggagggggaactgtccctggccgacaaggatgtgactgccaaagacagcaggttcaaaatgcccaagttcaagatgccatcgttcggggcgtcagccccaggcaagtccatcgaggcctcggtggatgtgtctgcacccaaagtggaggccgacgtgagtctcccctccatgcagggggacctcaagaccactgacctcagcattcagcccccttccgctgacctggaggtccacgctggccaggtggacgtgaagctcctggagggccacgtgcctgagggagccggcttcaaagggcacctgcccaaggtgcagatgcctagtttgaagatgcccaaagtggacctcaagggcccccaggtggaagtcaggggccccaagctggacctgaaaggtcataaggcagaggtgacggcccacgaagtggctgtgtctctgcccagtgtggaggtggacatgcaggccccgggagccaagttggatggcgcacagctggacggggacctgtccctggctgacaaggacgtgactgccaaagacagcaagttcaaaatgcccaagttcaagatgccgtcgttcggggtgtctgccccaggcaagtccattgaggcctccgtggacctgtctgcacccaaggtggaggccgacatgagcctcccctccatgcagggggacctcaagaccactgacctcagcattcagcccccttccactgacctggagctccaggctggccaattggacgtgaaactcccagagggccccgtgcccgagggagccggcctcaaagggcacctgcccaagctgcagatgcccagtttcaaggtgcccaaagtggacctcaagggccctgaaatagacatcaagggccccaagctggacctaaaagaccccaaggtggaagtgacagcccctgatgtggaggtttctctgcccagcgtggaggtggatgtcgaggccccaggagccaagctggatggtggacggctggaggaggacatgtccctggccgacaaggacttgactaccaaagacagcaagttcaaaatgcccaagttcaagatgccgtcgttcggggtgtctgccccaggcaagtccatcgaggcctcagtggatgtgtctgcgccgaaggtggaggccgacgtgagcctcccctccatgcagggggacctcaaggccactgacctgagcatacagcccccttctgctgacctggaggtccaggctggccaagtggacgtgaaactcccagagggccctgtgtccgagggagccggcctcaaagggcacctgcccaaagtgcagatgcccagtttcaagatgcccaaagtggacctcaaggggccccagatagatgttaagggccccaagctggacctgaaaggccccaaggtggaagtgacagcccccgatgtgaagatgtctctgtccagcatggaggtggacgtccaggccccgagagcaaagctggatggtgcgcagctggagggggacctgtccctggccgacaaggcggtgactgccaaagacagcaagttcaaaatgcccaagttcaagatgccatcatttggggtgtcggccccaggcaagtccatcgaggcctcggtggatgtgtctgagccgaaggtggaagctgatgtgagcctcccctccatgcagggggacctgaagaccactgacctcagcattcagtccccttccgccgacctggaggtccaggctggccaagtgaacgtgaaactcccggagggcccccttcccgagggagccggcttcaaagggcacctccccaaggtgcagatgcccagtttgaagatgcccaaagtggccctcaagggcccccagatggacgtcaagggccccaagctggacctgaaaggccccaaggcggaggtgatggcccccgacgtggaggtgtctctgcccagcgtggaggtggacgtcgaggctccaggagccaagctggacagtgtgcggctggagggtgacctgtccctggccgacaaggatgtgactgccaaagacagcaagttcaaaatgcccaagttcaagatgccgtcgttcggggtgtctgccccaggcaagtccatcgaggcctcggtggatgtgtctgcgccgaaggtggaggccgaagtgagcctcccctccatgcagggggacctcaagaccacggacctctgcattccgctcccttctgcagacctggtggtccaggctggccaagtggacatgaagctcccggagggccaggtgcccgagggagccggcctcaaagggcacttgcccaaggtggatatgcccagtttcaagatgcccaaagtggacctcaagggcccccagacagatgttaagggcgccaagctggacctgaaaggccccaaggcggaagtgacagcccccgatgtcgaggtgtctctgcccagcatggaggtggatgtccaggcccagaaggctaagctggatggtgcgcggctggagggagacctgtccctggccgacaaggacatgactgccaaagacagcaagttcaaaatgcccaaattcaagatgccgtcgttcggggtatcggccccagggaggtccatcgaggcctcggtggatgtgcctgcacccaaggtggaggccgacgtgagtctcccctccatgcagggggacctgaagaccactgacctcagcattcagcccccttctgccgacctgaaggtccagactggccaggtggatgtgaagctcccggagggccacgtgcccgagggagctggcctcaaagggcacctgcccaaggtggagatgcccagtttgaagatgcccaaagtggacctcaagggcccccaggtggacatcaagggccccaaactggacctaaaagaccccaaggtggaaatgagagtccccgatgtcgaggtgtctctgcccagcatggaggtggacgtccaggccccaagagccaagctggatagtgcgcatctgcagggggacctgaccctggccaacaaggacctgactaccaaagacagcaagttcaaaatgcccaagttcaagatgccgtcgtttggggtgtctgccccaggcaagtccatcgaggcctcggtggatgtgtctccacccaaggtggaggccgacatgagtctcccctccatgcagggggacctcaagaccactgacctcagcattcagcccctttccgccgacgtgaaggtccaggctggccaggtggacgtgaaactcctggagggccctgtgcccgaggaagtcggcctcaaagggcacctgcccaagctgcagatgcccagtttcaaggtgcccaaagtggacctcaagggccccgaaatagacatcaagggccccaagctggacctaaaagaccccaaggtggaagtgacagcccctgatgtggaggtgtctctgcccagcgtggaggtggacgtcaaggccccaggagccaagctggatggtgcgcggctggagggggacatgtccctggccgacaaggacgtgactgccaaagacagcaagttcaaaatgcccaagttcaagatgctgtcgtttggggtgtctgcccttggcaagtccatcgaggcctcagcggatgtgtctgcgttgaaggtggaggccgacgtgagcctcccctccatgcagggggacctcaagaccactgacctcagcgttcagcccccttccgctgacctggaggtccaggctggccaagtggatgtgaaactcccagagggccccgtgccggagggagccggcctcaaagggcacctgcccaagctgcagatgcccagtttcaagatgcccaaagtagatctcaagggcccccagatagatgtcaagggccccaagctggacctgaaaggccccaagacggacgtgatggcccccgacgtggaggtgtctcagcccagcgtggaggtggatgtcgaggccccgggagccaagctggatggtgcgtggctggagggggacctgtctgtggcggacaaggatgtgactaccaaagacagcaggttcaaaattcccaagttcaagatgccgtcattcggggtgtctgccccaggcaagtccatcgaggcctcggtggatgtgtctgcgccgaaggtggaggccgacgggagcctctcctccatgcagggggacctcaaggccactgacctcagcattcagcccccttccgctgacctggaggtccaggctggccaagtggacgtgaaactcccagagggccctgtgccggagggagccggcctcaaagggcacctgcccaaggtgcagatgcccagtttcaagatgcctgaaatggacctcaagggcccccagctagatgtcaagggccccaagctggacctgaaaggccccaaggcggaagtgacagcccccgatgtggagatgtctctgtccagcatggaggtggacgtccaggccccgagagcaaagctggatggtgcgcggctggagggggacctgtccctggccgacaagggtgtgacagccaaagatagcaagttcaaaatgcccaagttcaagatgccatcattcagggtgtcggccccaggcgagtccatcgaggcgttggtggatgtgtctgagctgaaggtggaagccgacatgagcctcccctccatgcaaggggaccttaagaccactgacatcagcattcagcccccctctgcccaactggaggtccaggctggccaggtggatgtgaaactcccagagggccacgttcccgagggagccggcctcaaagggcacctgcccaagctgcagatgcccagtttcaagatgcctgaagtggacctcaagggcccccagatagatgttaagggccccaacgtggacctgaaaggccccaaggcggaagtgacagcccccgatgtgaagatgtctctgtccagcatggaggtggacgtccaggccccgagagcaaagctggatggtgcgcggctggagggggacctgtccctggccgacaagggcatgacagccaaagacagcaagttcaaaatgcccaagttcaagatgccgtcattcggggtgtcggccccaggcaagtccatcgaggcctcggtggatgtgtctgagctgaaggtggaagctgacgggagcttcccctccatgcaaggggatcttaagaccactgacatccgcattcagcccccctccgcccaactggaggtccaggctggccaggtggacgtgaaactcccagagggccacgttcccgagggagccggcctcaaagggcacctgcccaaggtgcagatgcccagtttcaagatgcccaaagtggatctcaagggcccccagatagacgtcaagggccccaagctggacctgaaaggccccaaggcggaggtgacggcccccgacgtggaggtgtctctgcccagcgtggaggtggacgtcgaggccccgagagcaaagctggatggtgcacggctggagggtgacctgtccctggccgacaaggatgtgactgccaaagacagcaagttcaaaatgcccaagttcaagatgccgtcgttcggggtgtctgccccaggcaagtccattgaggtctcggtggatgtgtctgcgccgaaggtggaggccgaagtgagcctcccctccatgcagggggacctgaagaccactgacatcagcattgagcccccctctgcccaactggaggtccaggctggccaggtggacctgaagctcccagagggccacgttcccgagggagctggcctcaaagggcacctgcccaagttgcagatgcccagtttcaagatgcccaaagtagatcgcaagggaccccagatagatgtcaagggccccaagctggacctgaaaggcccgaagacggacgtgacggcccccgacgtggaggtgtctcagcccggcatggaggtggatgtcgaggccccaggagccaagttggatggtgcacggctggagggggacctgtccctggccgacaaggatgtgactgccaaagacagcaagttcaaaatgcccaagttcaagatgccgtcgttcggggtgtctgccccaggcaagtccattgaggtcttggtggatgtgtctgcgccaaaggtggaggccgacctgagcctcccctccatgcagggggacctgaagaacactgacatcagcattgagcccccctctgcccaactggaggtccaggctggccaggtggacgtgaagctcccagagggccacgttctcgagggagctggcctcaaagggcacctgcccaagttgcagatgcccagtttcaagatgcccaaagtagatcgcaagggcccccagatagacatcaagggccccaagctggacctgaaaggcccgaagatggatgtgacggcccccgacgtggaggtgtctcagcccagcatggaggtggacgtcgaggccccaggagccaagttggatggtgcacggctggagggggacctgtccctggccgacaaggatgtgactgccaaagacagcaagttcaaaatgcccaaattcaagatgccgtcgtacagggcgtctgccccaggcaagtccatccaggcctcggtggatgtgtctgcgccgaaggcggaggccgacgtgagcctcccctccatgcagggggacctcaagaccactgacctcagcattcagctcccttctgtggacctggaggtccaggctggccaggtggacgtgaagctcccggagggccacgtgcccgagggagctggcctcaaagggcacctgcccaaggtggagatgcccagtttcaagatgcccaaagtggacctcaagagcccccaggtggacatcaagggccccaagctggacctaaaagtccccaaggcggaagtgacagtccctgatgtggaggtgtctctgcccagcgtggaggtggacgtccaggccccgagagccaagctggatggtgcgcggctggagggggacctgtccctggctgaaaaggatgtgactgccaaagacagcaagttcaaaatgcccaagttcaagatgccctccttcggggtgtcggccccaggcaggtccatcgaggcctcgctggatgtgtctgcgccgaaggtggaggccgacgtgagcctctcctccatgcagggggacctcaaggccactgacctcagcattcagcccccttccgctgacctggaggtccaggctgtccaagtggatgtggaactcctggagggccccgtgcccgagggagccggcctcaaagggcacctgcccaaagtggagatgcccagtttaaagacgcccaaagtggacctcaagggcccccagatagatgttaagggccccaagctggacctgaaaggccccaaggcagaagtgagagtccccgatgtcgaggtgtctctgcccagcgtggaggtggatgtccaggccccgaaggccaagctggatgctgggcggctggagggagacctgtccctggctgacaaggacgtgactgccaaagacagcaagttcaaaatgcccaaattcaagatgccgtcattcagggtatcggccccagggaagtccatggaggcctcggtggatgtgtctgcacccaaggtggaagccgatgtgagtctcccctccatgcagggggacctgaagaccactgacctcagcattcagcccccttctgccgacctgaaggtccaggctggccagatggatgtgaagctcccggagggccaggtgcccgagggagccggcctcaaagagcacctgcccaaggtggagatgcccagtttgaagatgcccaaagtggacctcaagggcccccaggtggacatcaagggccccaagctggacctaaaagtctccaaggcggaagtcacagcccctgatgtggaggtgtctctgcccagcgtggaggtggacgtccaggccccaagagccaaactggatagtgcacagctggagggggacctgtccctggccgacaaggatgtgactgccaaagacagcaaattcaaaatgcccaagttcaagatgccgtcatttggggtgtctgccccaggcaagtccattgaggcctcggtgcacgtgtctgcacccaaggtggaggccgatgtgagtctcccctccatgcagggggacctcaagaccactgacctcagcattcagccccattctgccgacctgacggtccaagctcgccaggtggacatgaaactcctggagggccacgtgcccgaggaagccggcctcaaaggacacctgcccaaggtgcagatgcccagtttcaagatgcccaaagtcgacctcaagggccctgaaatagacatcaagggccccaagctggacctaaaagaccccaaggtggaagtgacagcccctgatgtggaggtttctctgcccagcgtggaggtggacgtcgaggccccaggagccaagctggatggtgcgcggctggagggggacctgtccctggccgacaaggacatgacggccaaagacagcaagttcaaaatgcccaagttcaagatgccgtcgttcggggtgtctgccccaggcaagtccatggaggcatcagtggatgtgaccgcgccaaaggtggaggccgacgtgagcctcccttccatgcagggggacctcaaggccactgacctcagcgttcagcccccttccgctgacctggaggtccaggctggccaagtggacgtgaaactcccagagggccccgtgcccgagggagccagcctcaaagggcacctgcccaaggtgcagatgcccagtttcaagatgcccaaagtggacctcaagggcccccagatagatgttaagggccccaagctggacctgaaaggccccaaggcggaagtgacagcccctgatgtgaagatgtctctgtccagcatggaggtggacgtccaggccccgagagcaaagctggatggtgtgcagctggagggggacctgtccctggccgacaaggatgtgactgccaaagacagcaagttcaaaatgcccaagttcaagatgccatcattcggggtgtcggccccaggcaagtccatggaggcgtccgtggatgtgtctgagctgaaggcgaaagccgacgtgagcctcccctccatgcagggggacctcaagaccactgacctcagcattcagtccccttccgccgacctggaggtccaggctggccaagtggacgtgaaactcccggagggccccctgcccaagggagccggcctcaaagggcacctccccaaggtgcagatgccctgtttgaagatgcccaaagtggccctcaagggcccccaggtggatgtcaagggccccaagctggacctgaaaggccccaaggcggatgtgatgacccccgtcgtggaggtgtctctgcccagcatggaggtggacgtcgaggccccgggagccaagctggacagtgtgcggctggagggtgacctgtccctagccgacaaggacatgactgccaaagacagcaagttcaaaatgcccaagttcaagatgccgtcgttcggggtgtctgccccaggcaagtccatcgaggcctcgttggatgtgtctgcgctgaaggtggaggctgacgtgagcctcccctccatgcagggggacctgaagaccactcacctcagcattcagcccccttccgctgatctggaggtccaggctggccaagaggatgtgaaactcccagagggccctgtgcatgagggagccggcctcaaagggcacctgccgaagctgcagatgcccagtttcaaggtacccaaagtggacctcaagggtccccagatagacgttaatgtccccaagctggacctgaaaggccccaaggtggaggtgacgtcccccaacctggacgtgtctctgcccagcatggaggtggacatccaagccccaggagccaagctggacagtacgcggctggagggggacctgtccctggctgacaaggacgtgactgccaaagacagcaagttcaaaatgcccaagttcaagatgccatcctttgggatgttgtccccaggcaagtccatcgaggtctcggtggatgtgtctgcgccaaagatggaggccgacatgagcattccctccatgcagggggacctcaagaccactgacctccgcattcaggccccttccgccgacctggaggtccaggctggccaggtggacttgaaacttccagaaggccacatgcccgaggtagccggcctcaaagggcacctgcccaaggtggagatgcccagtttcaagatgcccaaagtggacctcaagggcccccaggtggacgtcaagggccccaagctggacctgaaaggcccaaaggcagaggtgatggcccccgatgtggaggtgtctctgcccagcgtggagacggatgtccaggccccaggatccatgctggatggtgcgcggcttgagggggacctgtccctggcccacgaggatgtagctgggaaagacagtaagtttcaaggaccaaaactgagcacgtctggttttgaatggtcgtcaaagaaagtttccatgtcttcctctgaaatcgaaggaaatgttacattccatgagaagacttccacatttcccattgtggaatctgttgttcatgaaggtgatcttcatgatccatctcgcgatggtaacttggggcttgctgttggagaagttggaatggattcgaagtttaagaaactgcattttaaagtgcccaaagtttcattttcttctaccaaaactcctaaagatagtttagtcccaggtgcaaagtctagcataggtctttccacgattcctttatcatcttcagaatgctcaagttttgaattacaacaggtttcggcttgttcagagccatccatgcagatgcctaaggtgggttttgctgggtttccatcatcccggcttgatctcactggtcctcactttgaatcttctattctctctccctgtgaggatgttacacttacaaaataccaggtgactgttcccagagctgccttggcccctgagcttgctctggaaattccttctgggtctcaggctgatattcctcttcccaagacagagtgctccactgacctgcagcctccagagggagttccaacatctcaagctgagagtcactctggcccactgaattccatgattcctgtttctcttggtcaggtatcttttcctaaattctataaaccaaagtttgtgttttcagtcccccaaatggcagttcctgagggagacctacatgcagcagtgggtgccccagtcatgtctcctcttagccctggagaaagagtgcagtgccccttgccaagcacccagctgccatccccaggcacctgtgtgtctcagggcccagaagagcttgtggcctccttgcagacatcagtagtggcccctggagaagccccttctgaagatgctgaccacgaagggaaagggagtcccttgaaaatgcctaagattaagcttccatcatttaggtggtccccgaagaaggaaacagggccaaaggtggacccagaatgcagcgtggaggactcaaaactcagcctggttttagacaaggatgaagtggccccgcagtctgccatccacatggatctgcctcctgagagggatggagagaaggggaggagcacaaagcctggctttgccatgccaaaacttgcacttcccaaaatgaaggcttctaagagtggggtcagcctgccacagagagacgtggatccttccctttctagtgccacagcagggggtagctttcaagacacagaaaaggccagcagtgacggtggtaggggaggacttggtgcaacagcaagtgccacaggaagtgagggtgtgaacctccaccggccacaggtccacattcccagtttgggctttgccaaacctgatctcagatcctccaaggccaaggtggaggtgagccagcctgaagctgacctgcctcttcccaaacatgatctgtctaccgaaggtgacagcagaggatgtgggctcggggatgtcccagtgagccagccttgtggggaggggatagcccccacacctgaagatcccctccagccatcctgtagaaaaccagatgctgaagtcctcacagtggaaagcccagaggaggaagccatgaccaagtactcgcaggaaagctggtttaaaatgcccaagttccgcatgcccagccttaggcgctctttcagggacagaggcggggctggaaagctggaagtggctcagacacaggcaccggcagcaacagggggtgaagcagcagctaaagtcaaagagttccttgtttctgggtcaaacgtggaggcagctatgtccctacagctcccagaggcagatgcagaagtgacagcttctgagagcaaatcatccacagatattctaaggtgtgatcttgacagcacaggcttgaagctgcacctctccactgctgggatgactggggatgagctttccacttctgaggtcaggatccatccatccaaaggacctctcccttttcagatgcctggcatgaggcttccagaaacccaggttcttccaggagaaatagatgagactcctctttccaagccaggacatgaccttgccagcatggaggataaaacagagaaatggtcttcccagcctgaaggtccacttaaattgaaagcttcaagtactgatatgccatcccagatttctgtggttaatgtggatcaactgtgggaagattctgtcctaactgtcaaattccccaaattaatggtaccaaggttctccttccctgcccccagctcagaggatgatgtgttcatccccactgtgagggaagtgcagtgtccagaggccaatattgatacagccctttgtaaggaaagtccggggctctggggagccagcatcctgaaggcaggtgctggggtccctggggagcagcctgtggaccttaacctgcctttggaagctcccccaatttcaaaggtcagagtgcatattcagggtgctcaggttgaaagtcaagaggtcactatacacagcatagtgacaccagagtttgtagatctctcagtacccaggactttttccactcagattgtgcgggaatcagagatccccacgtcagagattcaaacaccttcgtacggattttccttattaaaagtgaaaatcccagagccccacacgcaggctagagtgtacacaacaatgactcaacactctaggactcaggagggcacagaagaggctcccatacaagccaccccaggagtagactccatttctggagatctccagcctgacactggagaaccatttgagatgatctcttccagcgtcaatgtactgggacagcaaacactcacatttgaagttccttctggccaccagcttgcagacagctgttcagatgaggagccagcagaaattcttgagtttccccctgatgatagccaagaggcaaccacaccactggcagatgaaggcagggctccaaaagacaaaccagaaagtaaaaaatctggtctgctctggttttggcttccaaacattgggttttcctcttctgttgatgagacaggtgttgattccaaaaatgacgtccagagatctgctcccattcaaacacagcctgaggcacgaccagaggcagaactgcctaaaaaacaggagaaggcaggctggttccgatttcccaaattagggttctcctcatctcctaccaagaaaagcaaaagcaccgaagatggggcagagctggaagaacaaaaacttcaagaagaaacaatcacgttttttgatgcccgagaaagtttctcccctgaagagaaggaagagggtgaactgatcgggcctgtgggcactgggctggactccagagtgatggtgacatccgcggcaagaacagagttaatcctgcccgagcaggacagaaaagctgacgatgaaagcaaagggtcaggcctgggaccaaatgaaggctgagaggtatggctcatcagtacaagagagatgcaaaaaactaagttggaaagtaaaggctacacacacatatggagcaccccatcccacagcacattacatccacctcacttcacagaacggagaacagagcagaaatgaccagaacacctttgtcaccatcacacagccctcctaaaatggaaccaaagcttcccagctccctcaaagctttggatgcaaagaaggcaccctgacttccacaagacaccagaattcacacggtactcagaggcactgctggggaagtttgttggtctttattagataaatttccagagacctgtccataatacccaacagaacatgactgtttctttgaggaaagggttataatgtctgtggtgtacaagtcgtttttggtataacttctttcctgctgctgctgcttcccggcaaacatagttttcctatttcaggcagagtgcggtatattccaggaaacactgtttcctactcacttagcttacttctttgttgaatgcctcactaatggcaagtttcaagatgttttgggtgacaatgcacacatgctgggcaaaagggtgatggccagtggctggcagctgggccagcagaagctaggacatctgtgagttgtcattctcatctatccatgtccactggcctgccagcatccgccagtgccttgccagtgtgcacggtcccacactgtggcccctgagtcccctaatgtacacgctgcagccagaatgcagatggagctggcttggctgttccctggatgggcaataaagaaagtgctgcatcccatgctgaagg

SEQ ID NO: 132 - DNA, 27552 bp, Homo sapiens
gttaggtgtgcctcaaccctgaagcaggtccctcagtctgcagatatttagagatatttaaaggaaaaccaggaaggagccaagagagaatgaagcctaaggtgtcctgagaccctcagagaactcagcccaagggttaggagcttgtgtcaaggtgcagcaggtgagtagggcacgcaggatttctttcctgggtacggaaggcatttctcttcagctttcattggtcccaggctcgtgccagacaaggcatgattgcacccattttggggacagtgcctgggcgtcccaggcagacccaggggccgcatgcagcagggcctgaggagggaggtgtggacggaggaggcccgctgccattcttggtatggttctcactccaggagcacagctgcatctggtctcactctgggcagcttataaggcctggtgtgagttttgtttatgcaagtgcagcataaaaggaacaaatctaccagcaccggggctgttgccactgagtccttttgcatacatttttcaaatgataactcactctacccaccccccttccctacccccaaggcgatttattgaaaaaaccaccttatatggtaatattgctaacacaccgtcagctggcctttttagggactttgtttaaagaagatccgcctctggggttttatattgctctggtattcatgccaaagacacaccagccctcagtcactgggagaagaacctctcataccctcggtaagtactgtacggcttttgccacctcttcctttccggggctgcctggcctcctgggtgcgggaggtgcctccagattggcctggcttctgtgacgctggcccagatcacacaccagagcccttggtgggcagcggcacctgcaagcatactgcagcctgctgagaaaaggcgtatctggccatgggacatcctggggcaggggcagcttggaaccgtgctccctgcctcagaatggggactggcgggatataatgcctgcagtctctactagccctgctccccagggccagtgcagatccacaccctgatgtcctttgtcttgggttagaatgtctgggaggctgttttaggggatcatatactttgcagaaaagcagcttttcagaatacttgagtcaaagccaacagtggtcctggtgtctgtgagctgtttagtccatgaaatgtctgtgctgggaatgggagggtattttcttcaggtcccctgtgggtctctctgtcctctgatctgtgcttggctgaggagaatggagggtttctgcagtccttgaaggctctaggatcattgggggatggagaaaattccacttgccctgtggcatcgtgaggtttcagggtagaaggaacttgggacccatctagttcattctcctctgatgaggacattgaggcctagagacgtacagccactcatccaaaagactcacacccaactgtgacccatttgcagatgtcattactccccccaacccacccaacacacacacaacacatgcacaaagaattaagaggaagatgagatgaaggggccacttctatgtttggcatcagaattcactagcatctcttcacaggtgaggcaggctgggtgtggcagtgcaggccttgaaggcagactgtcaggctaaccaagttactgagcgacctcagcttcctcacctgtaaaatgggggcaagaataataatatctacttggcgatggtgtgaggattaaacgagagaatgcgtatatacagcactcagctcaaggctgtcagggcccggccctgagttctcaaactttaagaatcacctggagtgcttgttaaaacacagattgccccatgccccaccccagattctgattccagtaggccgagatatggcctgatacttggaattcctaacaagctcccaggcgacactgaagctgctggtctgggaccacactttgtacagggaggctctaagtgctcactttgattacttgaatgtgggtttggactctgatactaacccttgggctgaaaagaggaagagcttcctgtgacagagagggatgggtgctggagaaactgcaatgaacagtaagatcctacatgccaggcctgagaaaaggggatgggccgtgtgacatcatgaccttggggcgagatatctttcctctttccccttgttcattctgccaacatttattgagcacttattatgggccaggcactgtctctgctccttagggacagtggagaggcttctgcagttactggaagagacagataaacagatgagaaccatggagcaaataagtacacgaaaggggtaaaggccaggaggagcccatcactcaacccaggagttatcagggaagacttcctggaggaagaggtgcctgagcttggtcctgaagtaaggaccaagcttggtccttcctggtaaagaggaagcatggtctttgggactcaagtggctcaattccactgaatttagatagcaaggcaggaatcaggtaaaactaaattcagaggggtccgcagggctggattacaagggctttagactctaaaggatcaggctatggggagccatggaagggttttaatctggagggtatctgttgaaggggctgctttggcagctgtgaggagagtggactggaacagggcaagagcgctactgcagcatgcggtggtcctgagctggtggcatgggtgccgtgcaggtagaagtaagaagggctggtgataggttgggagggaagagggcggcaccagggcattgggcatgggctcagggtgggtggtgtgagtctgtgagggcagctccgggcagaggctgctgatgaggagagcagtcctggaggtgtggagttggggtgccaggggggttttggtgggggagatgcacggcaggctctgcaggcctagagctcaagagaggggtctggacaggagcagagccaggggagtgaatggaagtccgggtaagagccagaagataaggcacccacgacagattgtggaggatccaaaatattactcagcagagttgtttttaattgaactcatgtatatatagaacctagtgaagatatcctgaagttaattagaggtgctgttagaattttccatcgtggcagtgtttttcatagacaatttctctctgccagggtttctgatggtttgtatatacgtgtaggcaaataataaaaggcagagacgcagctgcttacatgtcacttgaagctctcacccaaaaacctgtcgccaactattgtttgaaatctcatcatcgcagaggccctccgtttaggcctaacactttctgtcaaaatgaaaatgtctttgagaactgacataaattcaactttcaatagtcattgatgtgtgaaatggatcattcaattcctttcaatatgacaggcttcatcctgggagcaagttttgatggagaagagtaagagagattaataagaatcattattctttacagcccttgacgacagggattgacgaagcccggatagtaaatattttaggctttcggagcctgaagttctctgtcacaagtactcaattctaccattgtaacaaaagcagccatagataatatgtaagtgaatggatgtggctgtgtttcagtaagactttattagactctgagatttgaatgtcatataatttccatgggtcatgaaatatttttcttcttttgcttttttctcaaccgtttgaaaatgtagggccgggtgcagtgcttgcacctgtaatcccaacactttgggatgccaaggcagtaggacaactggaggccaggagtttgagaccagcctgggcaacatagcaagaccctgtttcaacaaaaaaaatttttttttgaaattagcagaatgtagtggccatgccagccacatgcctgccatcccagctcctaggatgaggagaaaggatccttgagctcaggagttcaagcctgcagtgagcttgatggtgccactggactcaatgcctaggtgacagagtgaggcccagtatctcaaaaaaaaaaaaaaaaaagaaaaaccattctgagatataggccatacagaaacaggccggaatttgccttaccctgatttacaatgtctacggcaccttcatttccgttctgtcatcttgtgagatagatactatcatttccatgttctagcggaggaaactaaggcccagggaaggaagggactgggctgtgggaaaggggaaccaggagggagaagagggtaaaggaaggaggagcagtgggaggatttctagagccaaacttgtctcctttgaggtgctggggagggtggattttaacagctctgccctcacattgggtttgaggtggccagggagacgggtgagtgagcaaatgacttgcattcattatgtctttggtttctggccacctttggggctaggggaataaaagcttcattcctgagtcagtgagagcttcaatgaagcccagatgtcattcgtgctgaaagaaccagaacaactctctgctccctgccaagcatgaagcggttgtgaccccaggaaaccacagtgactttgactctggttcagctgacatgctcgagtctagccacaaattaccagaaagcagctgaggaaagtttagaatttctcctggcagagatggtccacgagtctggctccagggtgaaccccttcttcccagagcagcacggggccctttggaggctcgactccgccagccctcccactgccttccccctgccttccccaccctcacttcggttgagttttgccttcaaaatagcagactccaagccacctgaagggctgcagaacagcgttgttgacagcttcaagtcgccttgtggcttctctgagctgctgctgtgctttggaaacaaaattccaggctctccctctttctgtgtgtgggaaacaccggagagagtttggggagggagacaaaagggcccattgaaaacccagacaggcttgaactgtaagtcacaccggagagagggttgctgaggggaccctagagggaggcagtcccggagcacagctttgcttctttggctacttccttgctttggaggttgctttcttctcaaggtggaccacctgctagaacagggcagcactgctgttcactggccagcttggagagaagactgcccatgtgattctaagtcaggcccttgtgactgaaccaccatgaggctggactgtggggactcgggtatcccagaggcagagcacaccaggtctgggaggggggccactcagacggcaacattgtcattcaatatctattgaacacctactgtcttaatccatgtttgttgctaccacagaatatgtgagactgggttatttataaacaatggaaatgtatttctcaaagttctggaggctgggacatccaagatcaaggcaccagcagattcagtgtctgtctggtgagagcccagagtctgcttccaaggtggcaccttgttgctgcaccgttacatggcagaagagcaagagagagtgagaagggaccaaattcgcccttttataaaaaaacccattcttgagaaggacattagtccattcaagagggcagaaccctgctgttaaaattggtaactaaatttcaacatgagttttgagggggacaaacattcaaaccatagcaccgcctgtgtgttaaacacccacttaggtgctggggctgtaaaaagtaaatctaggcgtggccctggcacaggagggactccatttcatagagagaaaagaacacagacccttttgttttagggtgcttgctgccaaccgctctggagagacaggctgaagcaaaaacaccaaacatggagaagttatgacagttccccaaagtagtgacgaaggcacatctcaggcttgggaagtgtcctcggtgggtgccaggcctgcctttcccagcctcttctcggtgaagagatctctggctaagttctttaccttctctgagatttggaacatactgctgtttcacctaccaaagcaacttgcaccttttctattgtattaaatatttcagtttctccattgtatggaggcttccagcaattagtttacaagccaacttatttactattcagtaactttttttgatattgagattgttcctaattttgatcattttaaacaaaggtgtgaaaacaggccaaatcttttcattcactcatgaccatttcacaaagatagattcgtagaataagtattttcaaattccctttcagaaaagtagtacaatttaacactcacaagcagtgaatgtgaagccaattctccatacctttgccagcaagggtggccccaagaaccacacacagtaccccagctaaaggcaaaggtagcttttatcctggccatagcacactgctgatggtcaacaagacaccaagtcctgctcacagatgctaaacagagctttcttttttcttttcttttttttttcttttttttttttttttttgagatggagtcttgctctgttgcccaggctggagtgcagtggctcgatcttggctcactgcaagctccgcctcccgggttcacgccattctcctgcctcagcctcccgagtagctgggactacaggcgcccgccaccatgcctgggtaattttctttttttttgtatttttagtagagacggggtttcaccatgttagccaggatggtcttgatctcctgacgtcgtgatccgcccaccttggcctcccaaagtgctgggattacaggcgtgagccaccgcgcccggccacaagaactttcacagtttggtgattgaaacccacatataggaattcatattcatttcattaaatttaaccttggctgtgtgtggtgggtcacttgtaatctcagcactttgggaggctgaggcaggagaatcacttgaacccaggagttcagaccagcctgggcaacagagggagactctgtttctacagaaaaaaatttttatatcagccagccatagggcatgcctgtgatcccagctacttgggatgctgaggtgggaggatcgcttgggcctgggaggtcgagtctgcagtgaactgtgttcttgccactgtactgcagcttgggtgacagagcaagaccccatctcaaaaaatatatatatatatatcttctgattcagctcattttctgtgccttttgagatcttcttggacttttattctttcacccagtgtatttaatattactctctcccagctgttttatctgaaaactttatcaacctgtgctttatattttcattcaattcatttataaaaatgtcacatgagaaagggtcaagagtagagccctgggacatattgctgcctcctcattgacattgactgaggcagccgcaaatataccaaattgtattattgcttagtacatggctttatcaagagggatatcctattctggaccttgtgggctggtttagagagtgaggactcatctctggggctatgggagacataaggatcagcagagacagaggcaaagctggatttaagaagtcacagcaggcctctcccctagtatgagccttgctttgaacatatctgggaagggcttccttttagtcttgaaaatgtttacaagcctctgctcagcatctacctagccttcagacctcgcgttctcaggcctgtggtgctgtctcctctctgcttcagtatggtcttctctgtccagcttctgcatgaggccatctggggccaagggtcacaggttttagaagttcccctctccccgctccatgccataggcacctgcaatcgcacatcctggataaaacttcagccggccttctctttatgtgcctggcgcctctcttttctctgggtttttggaagtctgcctgcccagcccctcagctggggccttccccacttctgccccgccccactgggtcctcccagggtaggaggcaatctctgactgtcttccgaggctctgttgcttctccttcatcaccaaatgccaggaatttgtcagatgctgtttgtaactcaaaagaaagaaagaaaaagaaaaagatacaggaaggaaggaaggcagaaaaagagaaagaaagaatgcgtgcagcagatgttgggaaagttaatttcttcattattttgcatccatcccagttcggatctcagcatggggtagggaatcctctgttgtccccatctgtcgaggcaacagtgagtcccatcatggagtcccttcttttcctctctcctcccagagtgccccttcctcatcaaggtgcttctacccttaggagtgtacatttcacctataaccactgcctattttttcctagtgatatgttatgctattgatttttaattatataaactatatgcaaatgcagcctccttgtaaaaaaattaaaatattatagatataacccagcacttcttctcccagttcctttccacactcccagaggtaatcatgataatcagtttgctaggtgtccttccagaacttttagcttctttctttggcttgtatatggccaccttctcactgcatcctcccgtggcctaccctctgcatgcatctggatcctaattccctcttcttataaagacacccattgtactggagtagtcatactggatgacagccatattgcattaatctcattttaacttaattacctctttaaagaccctatctccaaatacagtcaccttctgtgtactgggggttaggacttcaacatgaatttttggggggacacaattcacatttcagggcagagggaggaggctcaactgccagtgagtgggaggccaagcccatgcctgtccctcctggaagtgtgccctgattgcaggtagggtcaggccccaaagccaagaaactgtctccaaactgatttgacaagtggctgactagttctcttctcccgcaaatcccaaggtgctccagtccccagctcactcagccacacacaccatgtgtgaagaggagaccaccgcgctcgtgtgtgacaatggctctggcctgtgcaaggcaggcttcgcaggagatgatgccccccgggctgtcttcccctccattgtgggccgccctcgccaccaggtgcgtgctcatctggataccaccaggctttgagccactaggagtaagcgctgcactgtggagaccctgctgagctgggggttaggggaaggaaatgtgtgtgtgtgtgtgtgtgtgtgtgtgtgtgtgtgtgtgtgtgtgtgtctgtgcgtgtgtgtgtgtgtgtgtctgtgcatgcacatgcgtgtgtgcacgccaggtgtagggagttcttttctgattaactgatagagcaggaccctttaaatagaaatatccagggccaaaaccaacatacatcaggcacacaatgacactactatgtctggcttacatttggggggttgccaggtttggaaaagttaatttatatgggattgaacaagcctcttgcctttaagaaatttacactttgtgaagaaatacacataactaaccagagatcatgggctgtaatagaggtaaaatatttcacaggaagggaaaagtatcacagaaaaagtaatatctgagaataagaaggatttcagcaggtggagagaatagcaaagatttggagatctaagcaggcacaggggacttgaggaggatgcatacaagtcgtgtgtgtgtgtgtgtgtgtgtctgtgtgtgtgtgtgtgtgtgtctgtgtgtagtaggatgaggggaagaagtgtatgggaggggcttgttttatctcagaaaacatcgttgtctgaagagaaagaagaaaggccaccacacaagaaatcctccaccttctcttcctgacaccttcatactcactggcatctgctccatcctgtctcctgctatcctgtttctgggggaagaaaggctgtttttcccatccttatccttcttcagagaccttccagtgcctgaatccctctgtgtggagccctcagccattcatttctcttttcttctttttgcattgcagggtgtgatggtgggaatgggccagaaagacagctatgtgggggatgaggctcagagcaagcgagggatcctaactctcaaataccccattgaacacggcatcatcaccaactgggatgacatggagaaggtatctgtagacttccccttaatgagcctgctttaatgatcacccatcatcatgaccctcgtattcataggccactgtgctctgtcaactctccctctaaaatgcttctcacttctgtctttcctttcttttcagccccacgaccatttctccaacctaggctgccaacatctctccctggactattgcaatggcttcctggctgatttcttggtctcttgccctcattcaccgaattaattctctacactgctgcaaaactgatctttctaaacacaggtcagctcatgtcactcacctcctcagaaatcttcagtagctcttcattaaccaacagggggttcctaactccccgtcttggcattggaggacctttccctgcctgatccccgcgatcatcttttcctgcaatatttactcaggccagtgctcaccccttctttaaaatgctggtgctggctcaagagaggcaaacagccatctctctcattcttatcttccctgtcaagacttcacataggtggactgatgctagactatgatgatgagtctccagtgaaagtttctaagtagaactctctcagggtttctagaagcatttttgtttaagaaaatattgtggggggagcgggatttttaaatggtggagctcatggtaaacaaaattatgtgtgcaaaatgttaatagagcctttctaatattcttgtgattaactctggtgacagttggctgagtgttcttgtttctgcaacgcctgtctttggaaatgtgatagggggcttattgagcagactgcaactggaaatgaggaatgttgacttgaagtctgtaattcacttatacttttctctaaatcctagactgagtcactcaatgtgagataagtactgcacataaaatgcaatggatttcacgttatacagtggagtgggtaagagcacagacattagaggcaatggcaggaaatccaggtgcaaatcccaccctataagtcttagttttcccatttgtaaagtgaagataaaaaacactttgtgcattaggttgctttgaagattgaattagctaaatgcttagtataatcccaaggcatggaacatacttatgtgctcaataagtgacacatatgattcatatatatgtaacagtatctaatttaaaaacataataggccgggcgtggtggcttatgcctgtaatcccagcactttgggagaccgaggcgggtggatcacaaaatcaggagcttgagaccaacctggccaacatgatgaaaccccgtctctactaaaaatacaaaaattagctggacatggtggcgggtgcctgtaatcccagctactcgggaggctgcggcaggagaatcgcttgaacccgggaggcagaggttgcagtgagccgagattgtgccactgcactccactgtgggtgacagagtgagactccgtctcaaaaaaaaaaaaaaaaaaaacaaaaaaaaaaccacataatagaggccagtggctcatgcctgtaatcccaacactttgggaagccaaggcaggaggatagcttgaggccagcctgggcaacatggtgataccctatctctatgaaataaaaatgtaaaaattcactgggcatggtaacacatgactgcggtctcagctattcaggaggctgaggcatgagaatcacttgagcccaggtggtggaggctgcagtgagctgtgttcacgccactgcactccagcctgggtgatagagtgagaccatgtctcaaaaaaaaaaaaaaaaaaaaaaaagaaaggaaggaaggaagaaaacataatagacaaataatagacaaactattttattcacagtagtgacaacatgtgaactctttaaagaaacccttaaaaataaattatgtgccttaaggccgggcacagtggctcatacctgtaatcccagcactttgggaggctgaggcaggtggatcacttgagtccagcctggccaaccaacatggtgaaatcctgtctctactaaacaataattagctggatgtggtggttagcacctgtcgtcccagctactccagaggctgaggcaggagaatcacttaaacttgggaggtggaggtttcagtgagccaagatcgcatcactgcactccagcctgggcaacagagtgagaccctatatatatttttttttaaaaatgtatatatgtataaatataaaatcatttcattatataatcatttcattatatatctataaatcattgtgtgtgtgtgtgtgtgtgtgtgtgtgtgtgtgtgtgtatatatatatatatatatatatatatatatatatataatcttgtgtgccttaaaagaaaaaccaaattgggtaaaagtgtcaaatgtcctcaaattaatttataggctcattgcattccaataaaaattatgtgacataattctaaagtatgtttgcagaaataaataagcaacaattatgagaacaaaatgaatttttttaattatgaaggaagacataatgtaataaaatacaatataaattataaagttaaaacaatttgataccagcaaaaaggtaaagaggaaatatataataaatgaaacttccagcatcagaaaggaggaaaggactagtcaataaattatttctgggacaactgattagttatttttggagctagagaatcttggtttatagccctaagctcataccatttcaccaaacacatgtcaattaaatataaaagttaaatgtaaacatttaaattaccaaaaatataatacagttaatgtgagcatttaatcaaatttctggtaagagtggtcatagagaaaaagaatgacaaatttgacttcttaaaaaatcgtaacttttaatatctcaaaaataaccaaatttaaaagccaaataacaaattgcaaaacaaaagggcaatgagggattaatatgaacagttaatgcaaattgacaattaaaaatatgaagtgtcccccagacaaataaaaaacagttaattagctgaacagaaattatgaaaagttgcaaatgtgaaaaaatttaaactcatttgaaacaaaaaaattgaagtaaaataactaggtatgatttttacctatcaaattatttcatattttaagagtgagagcactgaattcagttaagaatggggtaaaacagccacttttttattctgaagtaaagattggtttagcctatttgttaataacagaaatcagaaagtcttccaattgctatgttctttagcccagtcattccacttttagaatcttcttctttggaaaacatcctgaatacaaaaaataaattgcaatatgcacaaagataactatcataggattatttataaccaaaaatcaaagacaccatgaatagtaatgtgattaaatatatgatagtatatgataaaatgttatataagcattttcaaaagtttaagtttatcaaaaataaatatttattatgaaaagtaaaataatttgttataaaaacaaatttgaacatagtataataatataataaataaaagaatatgaaataaataatgatagtaataaatttaaaaatacataaagacaaaggttaggaaaaagaaaaaagccaaaatgttaactgtttgttgttaggtgatggacataggggagatttttattccattaaaaaaaattttggccgggcgcggtggctcacgcctgtaatcccagcactttgggaggcggaggcgggtggatcacgaggtcaggagattgagaccatcctggctaacacggtgaaaccacatctctactaaaaatacaaaaaattagccaggtgtggtggtgggcacccgtagtcccagctactcgggaggctgacgcaggagaatgccgtgaacccgggaggcggagcttgcagtgagccgagatggcgccactgtactccagcctgggcgacagagcaagactccatctcaaaataaaaaataaaaaataaataaataaataaatacataaaaattttgagctaggatcttcctctgtcgcccaggccggagtgcagtggtgcagtcataactcactgtggtcttggcctcctgggctcaaggaatcctcttgcctctgtctccggtgtagctgggaacagaggtgcacaccacatccagttgattttttaattttttgtagagacagggtctcactttgttacccaggctggtctccaacccctgggctcaagcaatctgcctgtctcagctccccaaagtgctgggattacaggcataagtcaccacactcgaccttaaaaatatttttctaactttaaaaattatcaacatctttaacttttaaggtataaaaactccaaaaaagaaaccaaaatcaagtgcagatgcttgagcccaacacccaaggattctggttcagtgggtcagatgatcccaggtgactctgagacagggccttgaggaagcacattttaagtagcatggggtcccctccttaagaccagttgctgtccttcaggctcctgtgcaatgctcacagtccagggcctctgcctgtgccattccctctgcctcggatgccttttgcagcagcctctggagaccttcttttgccctcaaggcccatttaaatccctcagataatgaattactcctacctcttctttcacttaaaatgtggcttgtgtttttctttttgtttgttttggtcttttttaaacgtctctctcccctctggactttgcaactgagaatagggtgccatgtctgattcatatctgccctcatcacacttaccaccgtcttagcacaaacctggcggtccataaatacatgggtccaatggcatcaaatgaccctgtgcctcacctctgaggaaaccaaagccccatgtccctgctacactttgcccaatccctctgaaagactcctttttggtcgtacttgatcactgaagaaggaactggacacaggaagaaattaacttcctctaaaacagtggttcttttttatttttgagacagggttttgctctgttgcccaggctggagtgcagtgccatgatcacagctcactgcagccttgacctcctgggctcaagcgatcctcctgccccagcctcctgagtagctgagattacaggcaggcgctaccatgcctggctaattttttatctttttgtagagacaggcccacagtgtgttgcccaggctaagcggtggttcttaaccaggatgattttgcttcccaaaggacatttggcaatgtctgcagacattttttattgtcacaactggaaaactgctgctagcatccagtgggtggagaccagggatactggtcggccctccacaacaaagaattatccaacctaaaatgtcatagagctgcgattgagaaaccctgctttaaagcaccagcctggccaataatagccagtgaaaattgagcccaagtgcctctgtcagattctcagcaggagatagtgtacactcagctgcggttttgaaattgtttgacagtgtatactcagctggggttttacaactggttaaatgaatgtcctacagaaatgtgcatagggttaaggcaactacaaagggatgtcgaggcacccaagagccagcaacagagggagctctcacacccctaaacatgaaggggtcaggtgacgagggcagtgtcattggagcttagtgagagcttgagctctgaaagaggggctgcccaacaggaactgtgctcatggagggccacgccattgtcaggagatagaccctgacttcttttgccctcctactttccagcctcttgcaggaatcttctatcagccaaatatagccagaagccagaaagcaatgaacacttgagtgatacaatgtgccttgcatcactcagtgcacaaaggcaggggagagactgtaggagagtgaagaggagggaaggtcaaatggaaataatgaacacatagaaaatactggttccaggtctgagtcctacctggggccctgttgagaaggagtataccctttaaatgtcaatcagaaatttccagggctgaccattctcctctccagatccatcccatcctgtgtaacatggtgccacactctcccagcatgggaatgtcaatgagaattttccagccattgggagtctgccaggctcatatggcttttgtctccactagatctggcaccactccttctacaatgagctgcgtgtagcacctgaagagcaccccaccctgctcacagaggctcccctaaatcccaaggccaacagggaaaagatgacccaggtaagaagccaggaagacttgaacactggcataagaatgcaacatggatgcttggccagatactttctccccttcaaacatcagtgcaacagaactctctgaggacctgctatgtctgtggtccatgccaggccctgggggagtgggtgtggaataatgaactatcaaactggcatagttcctgcccttaatgagattacaaaccattctacaggccaagaagtgctgtgatttttgccaaataatcttttattcttcattgtcctttaagatcatgtttgaaaccttcaatgtccctgccatgtacgtcgccattcaagctgtgctctccctctatgcctctggccgcacgacaggtgagtaatcctgtaatccattccttttctgacttcaggggaggtagggaaaagctggggtctggcagaggctcctgctcagaagaatcaaatggacagctgaagtccaggcaaaatctttcttagggataataggtgagaatgcccatgtggaatgccagatgtgagcctagctggtatagttggaaaaaacatccagcaagaactgtttccctcacagtaataattccaggagcttctacacatacacacattccaacaatactggaatgtttctgcttcatgaagcagaaagagtagaacctgtggtggtggaaatgtaagtgcagttacacattgcttaatgacagggatacgttccgagaaatgtgtgtcattaggtgactttgtcactgtgggaacatcagagagtgtacttgcacaaacctagacgctgtagcctactacatgccccggctgtatggcgtggcctattgcttccaggctacagacagtatagcatttaactataattaatactgtagggaactgtaacagaatggttaggtatttgtatagctaaacatattgaaacatagaaaagttacagtgaaaatataatatcaaagataaaaaatggtacacctgtgtagggcacttacatgaatggagcttgcaagactagaagttgctctgggtgggttagtgagtgagtagtgagaaaatgtgaagacctaaaatgttactgtgtactactgtagactataaacactgtacacatcggctgtactacatttataaaaatattattcttggccaggcacagtggctcacacctgaaatcccagcactttgtgaggctgaggtgggcggatcacctgaggtcaggagttccagaccagcctggccaacacggtgaaaccccgtctctactaaaaatacaaaaattagttggacgtggtgtcaggcacctgtaatcccagctacttgggaggctgaggcagaagagtcacttgaacctgggaggcagaggttgcagtgagccaagatcacgccactgccctccagcctgtgtgacagagcgagactccgtctcaaaaaatatgtatatatatatattattctttcttcaataataaattaaccttagcttactgtaatgttttttaccttataaactttttaatttttaaagccatttttactttttttgtagtgacagtaatagaaaaacatcttttttcgacttttttttttttttttttttgagacggagccttgctctgtcaccaggctggagtgcagtagcgtgatctcggctcattgcaacctctgtctcccacgttcaaacgattctcctgcctcagcctcccatgacttttttttttttttttttttgagatgaagtctcactctgtcacccaggctggagtgcagtagtgcgatctcagctcactgcaacctccgcctcctaggttcaagtgattctcatgcctcaaactcccaagtagctgggactacaggagcgtgccaccatgcctggcttatttttgtctttatttagtagagaaaaaaaaggagtacaccctttaaatgtcgatcagaaatttccagggctgaccattctcctctccagatccatctcatgttggccaggctggtctcgaactcctgatctcaagtgatctgcccacctcagcctcccaaagtactgggattacaggtgtgatcatcacccccagccaaaaatagtttcatttatatcctttattctacaagcttttttctattaaatttattttattttattttttacttttagagcttttttgataaaaactaaaatatacacattagcctcggcctacacaggttcaggatcatcaataccactgtatttcatctccacatcttggcccactggaaggtcttcagggttaataacatgcatggagctgtcatctcctatgataacaatacctccttctggaatatctccggaaggacctgcctaaggctgttttacagtcaactttttatttaataagtagaaggagtacactttaaaataatgattaaaaacatagtataagagctgggtgcagtggcttatgcctgtaatcccagcactttgggaggccgaggtgggtggatctctttgagctcaggagttcaagaccagcctgggcaacatggctacaacctatctctacaaaaaatacaaaaagttagccgggcattggtagctcacgcctgtagtcccagctactcggtaggctgaagctggagaattgctggagcccaggaggcagaggctgcagtgagctgagatctcaccactgcactccagcctgggtgacactcaaaaaaaaaataaaaaaataaaagacagtataagaaatacataagccagtactagtaccatagttgtttattatcattttcaagtatgttgtacataatgtatgtgctgtacttttatacagctggcagcacagtaggtttgtttacaccagcatcaccacaaacacgtgaataaagcgttgccctatgacgtgatgtcagctatgatgtcactaggcaataagaatttttcagcttccttataatattatggcaccaccattgtgtatgtggtccgaagttgaccaaaatgtcattatgtggacatgactatatgtggccttggtatagaagtgtgctcagcgtaacagaggaaatctcaaaataaaatggtctttaataggaacttgacagcttccataaacatttgtttaaacgttcattaatcatttattcactgatttatccattcattcatccatcatatattttccattactccctacaatgtgccaaacatggtaccaggccatgggcacacactgacaaataagacagactttgtcattatggagctaacagtttagtgggagatagacaaaagtaaaagataatttcactgcatgtgataaggacaatgatggagaaatgcatggcatatacagtgtcgtatcctgtgctttgcactttggtttttgtttttgttttcattttgagatgcagtttcgctctgttgccaagactggaatgcaatgatgtgatctcagcacaccacaacctccacctcccgggttcaagcgattctcctgcctcagtctcccgaatagctggaattacatgcacctgcctctgcacccggctaatttttgtatttttagtagcaatggggtttcaccatgttggccagctggtcttgaactcctgacctcaagtgatctgccccccttggcctcccaaagtgctggcattacaggcatgagccaccgcgcccaaccttgcacttcgttgcaaacatcatgtttaatagccacgtggtagtcgttgtatgatggtttcattatgtatttattttaccatttctctattgctggagctttaggttgcctctcatttttattatacaatatgccatgattcaggtccttacacaagagtaagttgctgctttctggacatttattttgcatctggcccttactgaaccatctaactaggtctaatggtttcttaattgattctgttgggtcttctgtataaaaccacattatctgcaaataatgacaattttggtagtcacacctcctatttctattttctgtttcactgcaattggctagaacatcctggacaatattaaaaaatggtggtgatattgtaatgttttctcatccgttatgatgtggctgttagattaagaaatatgaggctggacgcagtggcacatgcctgtaatcccagcactttgggaggccgaggcaggtgaattgcctgaggtcaggagttcaagaccagcctggccaacatagtgaaaccccacatctactaaaaatacaaaaaattagccgggcgtggtggcaggcacctgtaatcccagctactcaggaggctgaggcaggagaatcacttgaacgtaggagacagaggtttcagtgagccgagatcatgccattgcactccagcctgggcaacaagagcaaaactctgtctccaaaaaaaaaaaaaaaagaatatgcaatgtagacttaatgcaaattgacaagtatgcattaccagtaatgtgtttcaaggaatacaaaaaaaggacacattttacttgccctccagaggcctacagtctcactggggggaaaaaagtgacatacataaaaaataaaaaatatgattgatgattcttgtgatgggtgaatattcttaactggtaaaggaaaatatggtagtcagagctcattggtaacagtcctagaaagagactgatgaaaggcaagaatgagaattttataagcctgatcctctctgtccacaggcatcgtcctggattcaggtgatggcgtcacccacaatgtccccatctatgaaggctatgccctgccccatgccatcatgcgcctggacttggctggccgtgacctcacggactacctcatgaagatcctcacagagagaggctattcctttgtgaccacaggtatccagccccttttctgattctgactggagctcagaaccaatctggtttaggacaagaagttctcaggaccaatgagaattctgtgactctgtgtctttaaactctcctgagatagactgagaggccttaagctggggctaggcctctggataagaccagatagtcatggaagcagtccctccttccccagagaccagctgcctctgtccacgtccacaccaggactagggctagtttccacaggctgaatggtagtgaagatctgctgatgcatttcattacctaggggcacctttggtttgaggacaaattgaataagtgaggcccgaatttctaaggggaaggtgtcatgtggcccacctgggcaatcggcattttttaggtgggagcctctctaggttctgtaagatcaaacatctgagtctagaccagaaatatgtcctgcaaagcccccaggaaggcctaaggctttgtcagaaatctcatgcaaagtcctgcatgggaatcaagacttgagactccctctttagaaagaggagtggaagaattaagattgaatggagtgacgcttgaccctcttcgcggcaagtctatcatcatcctatgactgaacctaaagtagacgtgaggccaggcgtggtggctcacgcctgtaatcccagtactttgggaggccaagcaggcagatcacttgaggtcaggagttctagaccagcctggccaacatggtgaaatcctgtctctactgaaaacacaaaaattagccgagcttagtggcgcacgcctgtaattccagctacttgggaggctgaggcaggagaattgcttgaactcaggaggtagaggttgcagtgagccaagatagcaccactgcacttcagtctgggtgacagagtgagactctgtctcaaaaaaaaaaaaaaaaaaagaataaagtagatgtgagaaggaggttttcatggagatcaaaatgggacaaccaaactatcagagctcagtattcaccttctgtcatttctgctccttccagctgagagagaaattgtgcgagacatcaaggagaagctgtgctatgtggccctggattttgagaatgagatggccacagcagcttcctcttcctccctggagaagagctatgagctgccagatgggcaggttatcaccattggcaatgagcgcttccgctgccctgagaccctcttccagccttcctttattggtgaggtgctgcccacagtccctgccaatctcaggaggggagggtggaggagtgggtgaggtatggagagagaaacaccaggagtcatggccactttgttaattacatacacgtacctcacattttcctaggaagggccaaaaatgtattttaaaaaaaattagggaaaaatctcattttaaataaaagggaaaggaaatcaagatacaggaaaagcagaacaggaaatataacatgaaacttaagaatgaggttaaaacacagaaagtttgtaggcagcaatgtagcaaggtcaggttgtagtttagcaagattcttctatctacagtgtggaatcatattgcatggataaaagaccggaggcttggccaggcgcggtggctcacgcctgtaatcccagcactttgggaggctgaggcaggcagatcacttgagcctgtgagtttgagaccagactgggcaacatagcgaaaccccatctctatgaaaaatacaaaatttagcagggcatggtggtgcatgcccatggtcccagatactcaggaggctgaggtgggagaatcgcttgagccgcagagatcaaggctgcagtgagccgtgattgtgtcactgcactccagcctgggcaacagggtgagattctgtctcaaaaaaaaaaaaaaaaaagagtagaggtaagtagaccaggcagatggcaagagccagtttggcgtgcaggaccttttgctctagaagactgtgatgccaggctacagtagctggatgtcaacctgcaggcaatgggtgactgtcagatgacatgacgagtatatccatacaatggaatcttatttggcaataaaagggaatgaagtattgatccatgctgtgaccttgaaaacattatactaagtgaaaggagccacacacagaagaccatatggtgtatgattccattgacaagaaacatccagaataggcaaacctctaaagacagaaagtggattcactgttacctagggctggggcagggatggaggggaaaatggggagtgaccgctattaggtatgggggtctcttttgaaggtatttaaaatgttctaaaattagattttggtgatgtttgcttctgtggatatactgaaaatgactgaattatatctcaaaaagttatgaaaaaagaaagatgatataacaaaagtgttcctttagaaatatgcttcaggcaacagtataaaagatcaggccgggtgtaatacctcgcgcctgtaatcccagcactttgggaggccgagatgagtggatcacaaggtcaggagatggagaccatcctggtcaacatggtgaaaccccatctctactaaaaatacaaaatttagctgggcgtggtggcatgtgcttgtaatcccagctactcgggaggctgagacatgagaatcacttgaaccagggatcagaggttgcagtgagctgagatcgcgccactgcactccagcctggtgacagagcagactccatctcagaaaaaaaaaaaaaaaagatcaatcagaactggggacaataaaggaaaggccatgacaaggaagggggtatgatcttataatccttctgggagatattaaggttctgaactagggtagttgcaacaatcgaagaagggtcatttgaggagctggaggtgtgcatatttaggaagtgatgcctgttgaccagacactgtgatctccactaggcatggagtccgctggaattcatgagacaacctacaattccatcatgaagtgtgacattgacatccgtaaggacttatatgccaacaatgtcctctctgggggcaccaccatgtaccctggcattgctgacaggatgcagaaggagatcacagccctggcccccagcaccatgaagatcaaggtgggtcttgcctcagttgtctccatcctgttctttgtataaagtcttgcctacctgggagttcctcggaggcagactgccagacctgataacttgctggtctcctgggttcaatatcatcctggactggagccaattttatcctacggaattatgttccttgggcattgatgggctgaagacccacttagcatggatctcaaacataatcccaggaatgtcacatgagaagaggctgaaagaatttgggatgatgagaatattatccaggtgtaatggctcatacctgtaatcccagcattttggaaagccaaggtgggaggatcacttgagcccaggagttgaaggccacaatgagctctaactgtgccactgcactccagcctgtctctaaatataaattcagatagatcctgtctctaaaaataaataaataaataaatagaatattgagagggttaagaaggaaatcaggagatgggaaatagaaggaaagaaaagaaggaggtcacactatggtatctttaaactttattgctccgaaggagggtaaaagttccaaagagtggatgtttggtcatagggccagctctgcttcaaactcaacagggacattccttgattcctgaacatctctgatctactgtcccatcttggccatgcccttccccatactgcctcccaacagggcctctcgcctcctgggcatctgcaggatgggagcttctcttctgcctctggtctccaagcagtcacacagacatttttagctccttctaggaactttgctgctaacagctttagagaaagagttgggaatagaaatatcacattggttgaaagttacaaagtctcacaataaagctggtctctggggagtaggcctgatgtaaggaaatgtgttctcagtcaatattctaagaaccttcatgaaggaaggctgccccgggccttccccctgcctaacagatggtgttcatcacagagaaatggagcaaaccagcaggaaactggtgagaacctgtgggctcttctcacccagagccacaggaatggtgcattactgaggcctgtcctgtggagagctgtgccaggcctggggcaggggctttttaccaggactgtgtgtcagtataccacgcctagcctcactcccagattctggtccaacaagtctgaattgctcccccatcacctacactgataaacaaccaccagtgatctgatgcatttcccaattcatgagccacagctctgacttaaacagtacgtgccagccttcatggagtttaggatctaattagtaaacattatcaataccaggacaatctaaataaaagcggaagggaaaggacactctaagcagaggaaatagaaggagcaaatgtgtccaggcaggtgtgtgcttatatgagcacctatccaaattggacagcaggatttgttataggggaactgggggagatgaggcaagtctcaaggacacagaagaacagatttggggtgggggtagggcttatatttaggaccaccaacctaagagaagccagagttttctcatgagaagtgtccaacaataaaatttgttaccttgctagtggctgtgcattcccagtccttgaaataatctgttcaaggagcatttgtgtgacttttgtctgcctggataataaaataacttctaaagatccttcttattctacaattccatgatctctgtgatttagggaatatgtaaagagattctacggcaacaaaaaaaatcaatttattatctggtttgctctagcactgaattcttagacccttccaaaactggaaaactagttgaagaatcatagtccttctggatcccctttgaagtagagttcaaagttgtttgacctgacaatcaatttctaaaagctaagcccaggattcctagtggaaagcatgaacaatgtagatataaatttgaggacttctgagatataattggctgatgacagatagctcaaaacagggtttgggtagactggtttatactcaggcatggaggaagcccagcccaacctgcccatgcttccaaactccaggcaagaacagaacaaggttccccttatagatatttgtattggtcagctattgccaagtaacaaacaaccgtggaatctcaggggcacctaacaatgagcatttattactcgtgcatctgcgcatcacctggaagttagctgatcaaggtcaggcttggctaagtaagtggctctgaattaactgcaggtccagccagctcaggtcaagtccatatttctcattaatgggcccaggctgaagggctagctgcttcccaggggcagctcttctcatgcacatggcagagcaagagaacatgcccaagtacacaagcatatttcaagcccctgtttgtgttatgtctgctaatatcccattggtcaaagcaaacacaatgcccagccttacagggagcagtgcactcttcccatggaaggaataagggaagaggggggaagtgaaggttttgagcaataatctaatctatcacaatgtttctcctgttcttttctgaccatggggctccccttttctgggataagtagatttttggaccaccttgcttattcccttggggactgatcatgattcaccacatttgttctttgcagattattgctcccccagagcggaagtactcagtctggatcgggggctctatcctggcctctctctccaccttccagcagatgtggatcagcaagcctgagtatgatgaggcagggccctccattgtccacaggaagtgcttctaaagtcagaacaggttctccaaggatcccctcgagactactctgttaccagtcatgaaacattaaaacctacaagccttacttctctgtgtggggctcttttttcctgggctatgtctcatacacagtgctaaggacttttcacacattacttttaatccatgcaatagtgctgtaaggtaggtgctatcattatacccatattacagatgaggaaattgaggctcagagaagtcaaggacttgcgaagatcacacagattccagattaaaattcaagtatctgactgcaaa

SEQ ID NO: 133 - DNA, 203313 bp, Homo sapiens
gtcggcgaggagggtccggccggagttgaaggattgaactttccggctcagtcgcggcgtctgcctggtcctcagcagtgcagccccggcgcggagcagggagcctcggcccgcgcccggcgccctcgccctcgccctcgacccgcagccatggtgcccggggtgcccggcgcggtcctgaccctctgcctctggctggcggcctccagcggctgcctggcggccggccccggcgcggctgctgcgcggcggctggacgagtcgctgtctgccgggagcgtccagcgcgctcgctgcgcctccaggtgcctgagcctgcagatcactcgcatctccgccttcttccagcacttccaggtacggggaggcccccgcccgggttctttctggggctgcggccgcggcgtgggcgcaccggggcgcgcgcctcccagcctgggctcgcaaagttctcggccagcgccgccggctgatcctggcttcccctgggcgtggatcttacagtcggggtgctggaactctcctttccagcctcttcccggctcctgaaaagaaaaagaagcccgagacatcttgccccaactccctccttcccagcaggaaaccaaaggcgatttccctggggagggagagtcgtggatgctgggagtgggtgtgtggatgtggcggtttcccgggaattggagtgcgcgagactccgggcgggcggcgactcccgcaaagtcccaggcgctccggggcactgggagggagtctgggaggcgcgtccggctgcgcctggggacctcacctcgagccccagccccgcaggtgcccgcgggccgacactttgtctcttttgaaagatggttttcactctctgagggctcagagctcgctgcccacccttggagccccagccagggtacttgtgccaagtcgtgttccagggtgcgtgtatgcgcgtgttgggggtgcgagtggctgtgcgcgcctcaattcggaaccccaaagattcaaggtcttgccctggactagcgtagagcgtcagggaagaagtgccggggacaggggatttggcggggccgtattcggatactcctcaacgagtcccgggggaaccgtcccccaaaccccgaacgtaggttctttcagcctgagggtggggagtatgtgtgtgtgcgcgcgcgcttgtgtgggaggctccgggagccgcgcgcttggctccagcgggttgccgggactctgccctgtggcgcggacccccgcgggacttgcgcgaggctccgggtgcgggtgggcgcacgagagcaggttccggactcagcgcgagcgagtgcagctgctgcctgtaccagccctgtcgagcgtgcgagctctgaaatcctccgcttatttttctcttctctcatccttctctccttcttcttctcgcctctatccctaggtgcccacctgttccaagttcccaatttctcgcttcagggaaactctggagggaccaaaaggagaaatgggggctggggggaggggttcccctggctgggcgggaactggaagccaaacccttggctcttaaactgggcgcccctcctgccagagctgggtcaaggggtgggggggggggtccccctagaggccctgggaattaagctgccagaggaggccatattaataagggtggaatgtggaagtgattccccttaccctcggggatgatcttgaaccggctggtgaagctggcgcgttcgcgagtgtgcagttgagtttgttctaagtcgtagaagcagcgtctcgtgggtgtcagagaaatgggcacgctctgtagtccttctgcgtcttcagggaatggaagacccagtgctcacctcctgtggtgaaattacccagacatcctggacagagccaggagagggccgatccccaggcacctggtttccagccctccgagtcctaccctgaaagtcactctcctaagatgccacactattgtttgaaacaacagaaaacaaaacaaaacggagcagcctattcccagggagaaagagtaccttttttttttctttttcttgaattgtcagtgctgtaatttatttgttttacagtttcagtggctaaagcaccagcttagatgaagccagttcccgtgaaaggcttttcttgtggtctccttggcatgatttctctttggaagaaaaactgctgacagaatgcacattgctagacaatcctgattacattttaattagctgggggtgaaataagctgcaaattactcagttaagacttaataagtgctgtgtttgtaatcaattgcaaagccattctgggagccttaaccctaacctggtaatgcctatctgatttatctaaattgcagggattaagtgtttttaagatctgaaaagccagcaacacattctccttataaaaccccaagcttccctgttccccaccgcttgccttcctttttttttttttttttttttttttttaataattagaaggaagatgggccgggcgcagtggctcatgcctctaatccctgcactttgggaggccaaggcgggcagatcatttgaggtcaggagtttgagaccagcctggccaacttgaaatcccgtctctacaaaaaatacaaaaattagcctggtgtagtggtgcatgctgtagtcccagctactcaggaggctgagggaggagaatccttgaacccgggaggcagcggttgcagtgagccgagatcacaccactgcactccagcctgggtgacagagcaagactgtctcaaaaaaaaaaaaaaaaaaaaaaaaaaaggaaggaaggtggagcaatcagtctgcagacaactcatgactgggctacgggaagtcttaagaagattgctttcctacagggtcacccccgcccccaactcctgcaaatgagcccacccataaagctgtctctggagcaggtgcctgtttccatcttctcttgcacggtttcaggccatgtttaaggatgggagaagcttgcctggcctccagcctggatgcccgccaggtatgtggactctcaattatgaaagctgtcaggccttgcctcaggagagcgcaacctatgcactcatggtgtaggcagtgacacagattccctggggcagtgacctgctgtcgtcggcctgcagaggaagctgtcgtctcatagtctgtgccccagttgtccccactgtcctccactgcccagcccttcagcaacaagacagaaaagcagtgggtagatgtgcacacctgacacctccaggtctgcaggctgtttctgccccacctgcacaaagtggctgtcaaccacgcccaaaaacacaagggactcagtactgaggcatgggggtgggaatgcagaccagggatacctgagtaatccaacactgctctgacctggaaaggaagaaaggaagatgggatggaaaccccatcatttcactactgaatgctgcccttcattcacgaaaagaaacagtgcatgttagcacctcctgaaatattagtatctggctccaggatgctttgtccaggtcatttggcatggagctatttcaggctcacaagtagaatacatatgtgcggttagcagagtgaagaggagctgtgggtctgtgaggtatggaacagggaagtgggctttggggctgtgcagacctgctctacacccaggctctgtagcgtcgcgaatgggtagcttgggtgcatcacatcaccttcctgaatgttaacccttcatatgcccagtgggggagagaagcacctgccctgcaagatgcaatcaggatgcaaaacatgttggggtgatgcaggtgatggtaatacagcagctagcactacccggaagattactaaggagcagccactcttctgggtattttacaagtactactcttttaatccccacaacactcctaggaggcagctactaaattagggaagaactcagaggtcttgaaaagttggctcatcacacagttcattgacgatttagccgggttaatagtgaggatggcttctagcttttggttttgtttctatttttaagattttgttggttagctggataatttacttcaggactgactacctaattttcaggccctggtgcaaaataaaaacgtggggcctcttagcaagaaaaaaagtgtttgttaaaggaaataagatataaaacgttttcctttcttctgccacttgcttctgttaacttgtcatggtgttttaaatttcctatccatgttgttctcagtgaagaaaattttaaagtttaattttagcatgacgctaactcttcttctttatattgtgcaatgccagctttacatgtaaatatcagagcacttaattcctggagggagccctgaaatggccagagggtccaacaggccagactcgggaatggtggaaggaggaagagaaggctcccccaaggctttggggtgtgcccagggaacactcatgtctcacaggcacctagggccttgggctcagacacatgtgctcaggcatgatgctggccaggtcccctcttttgcctgctgctgcacccggggattgtactcttgcctggcacaggtcctctggaaattgagccaggtgcctccccttcataggccagctgctcctgcccccagcagatgggcagctcccaggtttattgcatcctcctcagtggatgtgccattccagtgtctcagaatcgtgctggccacccaccaaacacaccatcatgctactagcatggaatggggacagacacaaccataccatgggacactgtatgacatgcatatggccaaccctgatcttccctacacccatgcccggtccctgcagggaccatagtgggcagggatcatgtgatgggaggtggggagcagaaggccagtggggcctgaggtgccaggtgatgggggaatgggcggtgagaacctgtcctggagaggtgagggtgcggtgggagtcaggattggttctgagctgacatgtccactctccagtgagtactgcagtgtgctattgactcttacatacaaaactcaaactcaaagaatttcagcatggccattgcagagcataccccaagcctaggtcctcttgtgagcatatagtggactgcactgttcatacgtctgtgaaactgacctaatttgctttgtttgtatgtcaaagattcagccatctgggaaagtttaaacctactttggagtggcggttcctcatagggtcacctgtaatgttaaagggtacgatgctgacatatgctcacttagggagaaacatctctcctcttatgttctcaacttctctagaagattaaagaagaaggaaaggagggaggtggtgcctgagataagccctgtctctttataggtgactcttgatgcatttgagagtgacttcatgccctatgcttcatcttggacactcctgctcctctgacctcctctgggtctgcccatgatggcacaggtgtagctgagtcttaagctctaaacataatcagttccctaagcatgggcaggcttgggacctgccattggcaatctcagcattggcaggcctgggacctgctctttgtctgcctgtgttttctcaatggaggctcaaaacagtagggtttgaggaaaagtagtagtccgtgggcaagtgaggcgggatgtgtgtgtatgtgtgtctgtgtctttgccagatttcagaatgcccagggagaaagtggatgggatcctgctggaagactaatagcaggttgctggcagcttggccctagggttccagaattgtactgatgttaagagattcttccttaatgggacgttattcgccctataaagtaccaccgataggctccctttggtagctgattagagatcagaggctcttcctagcagtaattggaagctgtttgttttggcaaaaaggagaatgaagctggtgatgagatcattccacttagagggccagcctctcctccaaggcaaagtaaacaaacaattagcgcatcaaaaccccagcagctacaaatcagccccaggctcacagatttcagaggaatggattttgtggtgctcatacccagcctacgatgtgtccctttgctctgtgctgagttttcagttatattgcaggatggccaggcatttagagagccgctgggagaaccacgactcgatgcagtttggtcttggtgtttcctggtctgagttattggctctctggctgcgtttctaacacgttctgaatttgacccaaaagaaaccttatactattcattgcaattttttgtgtttttaatatggtatttctctttgaacatgatttaaaactctaccttattgtgactgtaatagaacatttaaaaaacaatagaaaatacacttactaacttgtttatttctttatgcagtatatcaaatatatatatctgtatatatatatatctgtatatatatatctgtatatatatatatctgtatatatatatctgtatatatatatatctgtatatatatatctgtatatatatatatctgtatatatatctgtatatatatatctgtatatatatatatctgtatatatatatctgtatatatatatctgtatatatgtatatctgtatatatatatctgtatatatatatctgtatatatatatatatctgtatataatattatttatccacatgtgtgtatttggacacctaaattaaaaaggtaatattgttggtgcaagtgttcccacttttaaaaatgtaatcataaatttggaggttatcatatttattcaaaataaattcaccacctttcatgttctcacctaccaggtatgtttcagtgaatgagtataaaatgttggggttaaggtagagagacttatgaaagtgttagggggtactgcttgtattaagtcagaaatggagaagttccaatggattacttggtattgctgtccagaaacctgactctcataccattttggggggaagagaggtttgggacagcaattaatgaagcatatccatattatcaaaaggcatttttatttatgaaataggaatagaaataactgaaaatgtctctttgcagtgccttgtgtaaagtatagaataacataatttctgggcatcatctaagctcacagagccttagggttctgaagtcagctacctttcaacttttccatttaacttaccctggcctccatattttgaaagcaggttgtctatcaacatatggcgtttattaagtatgacctagtttttcctctttacattaatcaaagatagccataactctttcaagctttagattagcattaggttgcccccatgaccagagctgattgataaaatgaatagttatgacattttagttctctttgcaccatcatcttaggaaaatgtgtcattttggggagttttctgaaatattttaaaagaggtgatatacaccaattccttctccagtcgatgcagttgttgacctcttgcctcttaccccaccatcccccggctcctgtatcagctgctaatagcttacagctgcttccttttaagggaataacctttggccgatgggcaccatcttgcttgcaaggtcatgcatcctcctcccttgatgtgcgcagaccatggcgattggctctctgctcaggggatataggaggtcagccccctgctggaatcagctctgtaatgcaattcatgcccaaaagcatcgcatgggatcaggcttatgcagggctctggctgagagcccatccccacacaggtcttatctctgccttctcctgcttcctctcttccctcttctactgagagcttttctctccgccccaatattacctcatgtccgagaaaccccatttcaacctctgcttctaggaaacccagtctaagacacctcccttcagaaacacgtggttccattcaacacttttgttttttctgatcagacaactcggttcttatagaaatgacctgttcaagctagtaggtagaataagtaaaaatataagttagcttttacactctcagctaagacttcatttactatccttcaaaaaattgagagggtatacaaagtttaaacatcattttaaataaagaaacagattcagaagattttctgttacttgaatttagtttctagctcctgatgacttcagtaaaaagatttcaattcttggacctagtaggtaagcacatcatgctccctcattgttgagaattcaatgaaatgtgaaaatatgcactgttcaggcaagcttgaaatagctgtagggtaagtgggcagtagctggagtgagaggacatcattaacgacagtactacatggcaggtctaggaagaaggcaagggagccccaatagttcaggtatcagccaacattggatttactcagcatgcaactagtggagctacaccccaaaaaagctacatcctccaggacctgcaatcctttgtatattttaaaaatgtaatttgtgtatggtttcaaagaggtgaggggagacattttccctgatggtaaagagggttggataaaaatagttatacttattagccaatatgtaaaaaatgcccagaaaggaacaaatgtagcatttgtagattgttttcatgtaaatcactgtctgcataggtgctgaatctgtttctttctttaaaaagtactgatttatttgcatttccctgatcactagtgatgttgagcatgtttttcatacgtttgttggccagttgtatatcttcttttgagaattgtttatttatgtccttagcctactttttgatgggattgcttgttttttcttcttgctgatttgtttgagttccttgtagattctggatattagttatttgtcagatgtataggttgtgaagattttctcccactttgtgggttgtctgtttactctgctgactgttctttttgccgcgcaaaagctcttcagtttaattaagtcccacctatttatctttgtttttgttgtgtttggttttgggtatttggtcatgaaatctttgcctaagccagtgtctcaaagggttattccaatgttatcttctagaatttttatagtttcaggtcttagatttaagtccttgatccatcttgagttgatttttatataaatgagagacgaggatccagtttcattctcctacatgtggcttgccaattatcccagcaccgtttgttgaatagggtgtcctttccacactttatgtttttgcttgctttgtcgaaccacgatgtggtaccaccttactcccgcaagaatggccattatcaaaaaatcaaaaaataatagatgttgacatggatgcagtgaaaagggaacacttctacaccactggtgggaatgtaaactagtaaaacagtgtggaggttccttaaagaactaaaagtagaactaccatttgatccagcaatcccactactggatatctacccagagaaaaataagtcattatatgaaaaaagatacttgcacacgcaattgcaaaaatgtggaaccagcccaaattcccatcaatcaatgagtggataaagaaactgtggtgtgtatgtgtgtgtgtgtgtgtgtgtgtgtgtgtgtacacacataatggagtaccactcagacataaaaaggaatgaactgatggtattcgcagcaacctggatgggattggagaccattattgtaagtgaagtaactcaggaatggaaaaccaaacattgtatgttctcacttgtaagtgggaactaagctatgaggatgcaaagtcctaagagtgatacaatggactttggggactccgggggaaagggtgggaagggggtgagtgataaaagactacacactgggttcagtgtatactgcttgggtgatgggtgcaccaaaatctcacaagtcaccactaaagaacttacttgtgtaaccaaataccacctgctccccaaaaacctatagaaatgtatttttttaaaaagtactgatttaataagttgcatttatttcagctaatatcagtggattgttacaattccaaagatgagctaaaacctctgtacatgaggaacttagggtctattctaggctaagacttgtttgtaaacagacaagttcagcccaatagatggagttttttgtatgagatctcagaggagggagggtgtttatctttttagggaaagtctcataactgctagctgagttattccagcttggaacagcatgtgtataaatacagagtcttgcaacagtgtggtctgttgttggggaccataacctaaatggccatgatatagcatcagcctcccagctagcagccagactttgggaacttgttagagaaggaataaatagccacaaagctcaagtgctttgttctgcaaggcaggttaagagcatgcccattgtaacatgatgccacattcaagccacaacacttagggatgtgtgtcttgctggttcttgctaatctggttgaatttcaactcttaatgcttttcagttgatctctatggagatccttggccacacctctaagaaagagcctaagaaagaagaagggaggaaaaggaggctatctcttggcttgcggttggacacagcttctgaattagtggaaattagaagctctccggaattcctgagccacaggacagaaggcatttagcattgcattttacagtgttttggagctgacacagttgtttcacataaaatatctatttgaccatcacaactactctgtgaggtcaggaatgttatttttctttacagataagaaaactgaaggcctgaaaatgagataaccaaggatccatagcagaaactcaagccctcattgtcacattcctagatatttgtactgaatgactccacttcttagtatgttaacagcgagagaagacagaggggaaacagcacctatattatgatccagagacactcagttgtaagggaactaggacgggatttctcactggcttctggaggcagttttgcaccacagttgcacagatgaggacaattgaaaggttgctggtgtgatagaaaatggcttgaaaaatatcagtccatcaacaccatcccgactggtggtgcacgtacccacccaattcattcttctaaccaataagaatctgcaaaacacaaccgtctttcaggtatcttagattgtgaggccccagcatatgtgagatgtgcttcttgcctccaaaacaattactttctttacaaattttttgtttgttgtttacacaaggtctccctctgtcacctagactagagtgtagtgccatgatcatatctcactgtagctttgcactcctaggctcaagaaatcctccctcaacctcctgagtaactgggactacaggtgtgttacacccccgtacctggctactttttttttaagttttttgtttttgtttttgtttttccccagagatggggtcttgctatgttgatcaggctagtttcaaactcctggcctccagtgattctgttgcatcagcctcccaaagtactgagatcacaggtgtgagccaccatacctggccaagagaattattttctactggagagaaggacaaacatttaataaaattgctgcaagttgttgacgtgaagaaagaaactattaaaaccatgaatcgtcttttaaatccttacatatagtaatttaactcatgatcatggatattgatatttttcagatgaagaatgtctttttttgtttttgtcaattgcttttttttaggcctatccaattttccatgcatgtaatgaaatagcagagttttatcgagattcttggggaagcgttccaagcagctggagtcctcgacatcacaggggatgtttgctgcctgcaacaaaagttgcggtgtcctcattcttggctgtgttgctgttgtgtatgttggtgggacatgtgtggagtcattgtgcatggtaattgtagcttgcatgtatgtgacagccatttccacgagctcagtgtgcctgacatgcttgcttcattgccttttgtttgggttttggttatgtgtgtgtgtgtttacactttataattctttccggcatctctgcaaaatataaaagttaggcaatgaggaaatctttcaaaaaaagaattttgaaaattctcaaggctgcacatgagaacaagatggtaaagatgtgaagttttggggttctttaatccccgaagctttaaaacctctcctcaggggagtctgagaaacaatacccatcaaaaggcttgaaaagaatccggcaactaatcaaggctcttaattcacattctgtttacccttttgttttgaattataacttttttattttcataaggttttttttttgcttttcaagttgttaatacttcagaaaatattttcttagtgagctcaaaaatatataattttgtgtttcacattaccctgattcttataaagataacgcagatatgttgttaccatttaaaaagtcacataatgggccaggtgcggtggctctcgcttgtaatcccagcattttgggaggccaaggtgggcagatcgcctgagtttaggagtttgagaccagcctggccaacatggcaaaaccccatctctactaaaaatacaaaaattagccaggcatggtggtgcgcacctgtagtcccagctactagggaggctgaggcagaagaatccctggaacttgggaggtggaggttgcagtaagccgagattgtgccactgtactccagcctgggtgacaaagaacctgttgagttctttgaagggttcattcaaggaaagttgattaactcttgtttaaatctctaatagggcattattgcaagagacagtccatctagacttacacaaatatcccagtccttgtctttaaatgcctacactgttggaagtaatgacactcttctgaaatgtagactccttgttatactgtgtataccagaaagaaagttgaccaaaacctgtaagcctaaaatacgggagagagatttttaacagaatacacagcttatattgacatgtgtcaccccatcaactggacaggtccagagtgttgttataacaaatccagtatgccaaggaggattgcatttcagggtcattagtttgctttccaactgataggactcccgcagaatgcaaattgcaagatcctttacaatcataacgaatagtgataatagaatcatccccacaattggaagtatacgaatattttctgagaactctgcaccaacaatttctgatgcagcgctgagatttccactttttcttcttcatggccagatacttttgtctctgccaactgctgttttatccctcgcttgatggtcatttctgcccagtggacagagttctgctcacctagaggcgtaattgtgcctaaaacaaggagcagagaaccacgtagctgtaaggagatgctatggcaaccagacatcagaggttacctattcctgcccaacagtcctgccatatgaatgacccacataaaggcagaattacaaaccacaccacagcattggcgcctggcccctagagttgaaaccaatcctgttgatgccatgaatgccaagttcatgcagaagttactgactcctttcagatagaatgagaagaaaatgggaggccagttgttgtgaacatgttttgacaactgtgcttcttttaaatttcatctgtggcaagaagggacaaagacgtcacctagggtggtgtccaccattaattgtttgaaggtgggcactttgttccccattttcttttccatgttttgggctactaaagctatttggggccaggcatggtagctcacgcctgtattcccagtgctttgggaggctgaggtgggagaatcgcttgagtccaggagttcaaggctgcaatgagctccagtggcaccactgcactccagttgggtgacaagagtgagactgtgtcctcaaaacagaaaagtcatttggaactagaactttgcctttaaaatctaaaatatgtgtcccatatatccttgatggatagtgccatcatatcttttgcttaatcatttattttttaaattttgaatttttatttattttatttatttacgttttgagacagggtctcactctgtcacccaggctggagtgcagtggtgcaatcatggctcactgcagcctcaaactccctggctcaaggatccctccacctcagcctttcaagtagctggtatacaggcctgtaccaccacgcttggctaattttttaacagtttgtagagacaagttctcactatattgcctaggcttgagtttttattttttgaaaacagagacagggtctcactatgttgcccaggctggtcttgaacttctggccacaagagatcctcccatctgggcttcccaaagtgctgggattacaggtgtgagccactgtgccaggtcagcccatcatatctttgagtagaaatgcattgtctctctcttctcgctctctcctgatctctcttttctttccccctcttccctctccctttctattttgacatttggctgtaccattttgaaagcagtacagccaaacctagtggtcatcattccagaaatggcctacatctgggaagtatttttttttttcccattgggccagaatttaaaagaaagtagagaacatcttttggttgtttttgttgtttccacatttttgtatccggagttatgagctaatgccttcacagctgcaaagaaattttttaaaaaaaatctggatagaatatattctctggttatgtatcacaatcaccagaaaaacaaatatagactagtcgaccatctgtaattttcatttttctattatccaggagccatagatttttgcaatgttttaaacctgtttttaatagggcaagatttgcatactctagttcactttattactccacaattttgaaaagaagatggaggttgcttttttacataacctcatgaaattagggctagaatttaatttccatatattcgtctgtgtgtatattatgcatgcgtttctagttcagggtttgtcaactatgacactgtggacgttttggagcagattcttctttgttgagtggaggggctgtctggtgcattttaatggttccacagcatccctggcctctccctactcaatgccagtaccatgcctcccaccttcagtcatgacaaaactgatgtctccaaacatagcagtatgtgaatatttgtatcgggatatccatatctattccatctgtctctgtctctgggtctctatctctgtgtctgtctctatctgtatatgttttgcttccactctatggcaaacatcctggcagtcatgacatggcttagcttcttgttctcaggaaacactaagggtctgtgctgtgtcaggctctttgctaggcgctggtgttgccaagatgaccaaggcacgtgccttcattcccaaaggactgtgtcagggaactggggtgcacagacacaaatgaggtgtcaggtgtcactagctcagagatgggaggccacaagaggaggggttacagggtgatccagagtgcactgtggatccagatcgctggtgccctaccctggttctgtcccttcctatgcttacatctctgctgtaagtaattctggaatcaaaactgatgctgtgaactctctcgcttatgaggagacatggacatccccattcacagtcagaggagaaggtttgggccctgagatgaccacaaaaggacagggttagcctgacaagttttcatcttctgaataaatgagaccttgtagcattctgttaagtttctctctcctaaacgaaaacctcactttccttgcgtctttggcaaccctgattgtgaagatgtgtcgtggcatgtgagcatgatcatataagtagatggatggttttatctatgagcagactcatgcaaacttagttatgctgcatcttcttctttaaattcacattatcattatttctgttggtgagctggtcctaaggtcttctgtttttgggacttctttgcaagtaaacttcttttcctttctgaagactgttgtctctgccctctctctcagaccgtcgactgccctttgcctccattttgacggtggtgctgcttcattgagttttctgggatgccatgcattttactcagaacagagcctcttacttggctctacagacgcgctggctgtcatcaggttgagttaggcccagagggagtgcctggtgctgatgatcctgggattcaaaaatagtgtggtgcatgcctgtagccccagccgcttgagagactgaggagggacgatcacagcctaggagttctagtctagcctgggcaacacggtgagaccctatcgctaaaataaaatgaatagtatgtaaccctggatccccagtgctctacagtctggtctgagagacccctccacttccaaaagagatttaaaaacttaattttttaatttaagagactctttccagtttgttttgaagtatctagttcaatcagtagagcatgacatgcagatctctcgtgtgtgcttttgttacttaaagatttcccattctgggtggccatggtgggcctgtcatcccagtgctttgggaggctgagatgggaggatcacttgagttcgggaatttgagaccagcctgggcatcagagtgagaccccatctctaccaaaaaaaaaaaaaagaaaaagaaaaaattagccaggcttggtggtgcatacctcttgtccttgctacttgggagtctgaggcagaaggattgcttgagcccaggatgttgaggctacagtgagctatgattgagccactgcactccagcctaggtgacagagagaccctgtctctgaaaaaagagaaatatttcacctttccgtatgatgcataggataagattaagtagatttttaaattgaaatttgaaatcctggataaatattgtgtaaggaaaaaaagtcatttaattccaagtcatctattctactgggaaaacatacctgacttttcagacatccttctaattctgcaatgaacacatttttcttggaatgagttttatttttttgcaaagcagttttttcttggggttattgctctttgcgcttgcatcacatttaattaatcatgttttctcaagtgatccctcattaaaacacactgtcttttgaagtttatattaaaataacccagaatcatgatgaatgggttagaatataagtcagggcataatagactatgaggtactctattttagtttgatgaattattctgcactctttaatgaataacataaattagcataatgaaaaagcatatatcacaagaaaacaatgtgacaaaaatctgacacttagtaaagtcaattagaaggggaaaacatgtatttttagtcattttttttccccttcttgggtgttccctactacaaatgaagctcaactactaagtcctgcatctcctagtttacatgtgtatagcaagatgggggttttgctttaccattaaaacaacaacttctaggacttaccaggcatattccaaaatgtgttgctaaaatattcagtagggaagcacatggaaataatagtttttatctctggggcacggtacgttttttcaattagatttttttttaatggttatagtgataatagcaatagttcccagctcatgttatccggaagcatatcctctccacctactcttaatgcatgtgagtaattagcttgataacttaacattaatccttaacctctgctggtcaacatgccagattccaggcagtaatgtgccttgtgggaatgacttgttatgtataacatattgcacctgtcaagctttgcagctgccaagcatctattttgaaaaataatagggtgatttgagagtgcctttaaagtctgctttgtgcttttgccacacagtcatccccagcaagaaattacatgtttctacagttgttctgtatgaaaatggccagagactgagatgaggccaagacagcagaggccagagaggtctagaccgccctgaatgttgttaccttgagtcttggtcttggagaaaaagaaaccagcacatgcaaagatcaacttactgctttacaaagagggttgttctttctcaatgacaagaatccaataagatacctgtaagagctgaataagggtctcagtcatttatttgggacacttggaagggagagaagagagacatttgggccggacacggtggctcatgcctgtaatcccagcactttgggaggccgaggcaggtggatcacctgaggtcaggagttcaagaccagcctggccaatctggtgaaaccccgtctctactaaaaatacaaaaattagccaggcgtggtggtgggcgcctgtaatcccagctccttgggaggctgaggcaggagaatcacttgaacccgggaggcggaggttgcagtgagctgagatcgcgtcgttgcactccagcctgggtgacagagtgagactccatctcaaaaaaaaaagaaagaaagaaaaaaaaaagaaagaaaggagacatttggagtgtatttcgtgaagtcacataaagcaaaggaagagtaagcatctcaggctttcgtggggatcagccatatttggacaacttgtaaaacagctgactgctctccagccccaggagttttgattctacgagtgtaaggtatatcaccagaatttgcaaaagcttccaggtgaggctgatatcactggttccagtaccacactttgaaagtcactgcttcagtcagtcatgctgtcgggcttctctctggtacctttctttgcttgataagaggtgccaagttctagctttggaactgtccattctccatcccccagcttggacattcttctgggcagccctttttgattcaggttatgtacaattgattaagtgtgagcttactaagtagaagtcagtggtggtgtcctcagcagaaacatcattataggctcacttagaatcagtagactcatttgtcaaatgagagggctggagtcactgtctggctgccatgtcttttgaaacatgagttttgattccaccttgttgacagatgaagaggccattgtcaattcctctgaacatatgtgttcagggagagagagtgggtctcctgggagagaatgggtcattagtaatcaaggtccaggtatggaacaaagatcaggaacataaagctgaaggtctcaccagagggtgcaacattttaaaagtagattggttacacctggggagaattgtgtgcttggccaaatcacctcattatgacggtgtggttcttccatgtttattcaagcaatcaattttcaccaaaactggactacttgattctaaacagtttacattatggattacaaatgccttcttatgatacacccacttgctgtcagattgaagtactttatgaaaggaaaaaccattgtcagtgagatggacagatgggttgttacaaaacaccatgttctgacatttgctgggagatggcaaggaggccaaagtgaagaaataaacattgatagtgagttgaagcaaattgaaaaaataatacgtgaacatattaacacatagattattaactgaggtgcaggttgaagtgtggctgaaacaatgtagtatttgtcccatggctttaatttattttagtcgcttccggattgaataatgcacctctaactccatatgttgatgtcctaacccccagttcctcagaaagtgacaaagtggccttatttggaaataacgtcgttagagatgtgattaattgagatgagtcattctggaggagggtaggcccctaatccaatatgactggtgtccttactgaaaggagaaattttaacacagacatgcagagatgtgaggacacggatgtgaaggttggaatgctgccacaagccaaggaactaccagaagctcaaagaaagtcatggagccaatcttcccctatggcctttctgagagagcatggtcttgcgataacttggtctcacacttccagcctccagaaccgagagacaataaatttctgctctttcagccccctgggttgtggtactttgtcatggcagccgtaggaaacaaagtcatatatttcaatgtgaatttgaaattatactaagaatagcacttgacagtattgcattttcatgttctcccaagtggggttttgatatgtgaatctaatttagtgtgaccttgcattaaacaactgtatagattctattctttacatggatattatgcctttgcaaagacttgaaacaaccatacaatgtagaaattaattaggctgctcttatttataaggcactggaaaccattttctttactgttgtatcaaaacttactgagggattttagaattctgacttctccatggctaatcgcatgattaattgggattaatcaacctccaggtggggccccagagctctctgagaccttctacgttattgaaagtcactccttgtgtgcaaagtggtcatatcactgaacttggcatcttgccagctagactacagccttgaccttggatggtcacaggtggttttcatagacatctctgtgattatcttgtaaagacattattcatctcatttgagaaaagaagacattaatttttctgagagcttaccacccatggtggatgagtagtagcctggcatgtgaaataaagcctttgactttaagtaaggtgtgcttactattaaaatattctttgtgtttgaatcagtaatagttcatacattttttagccttcctgagccccaattgactcatctacaaagggagactgttgaacttgaattgctattaacttgccattctcaggatgtagaattttcctctgactcttgtgttgccactgttgccagtggctttcacatgttattctgatgtgtgacaatgactaacctgatgatttgggacagtcttaggcatggtaattttgaggtttagagctatcattggacacttagattcctcttcagcatggtaattttgaggtttattggacacttagatttctcctccaaccccattctttgcttttcctttctcctcagacattagtggaaattctaagttccccactatatgctcatttccatgatgtggtttgtgtcatcgtcttggtcctgcccttgagtattatggaattcagtaatatgtgtgtgatcttccttcttcacactcaggcaggatggtccctgcattgtgtttttctcttctggttttgatgttttcctttggcatggtaaatgttttggagagagttactagatgaattagttaatcagagaataaaatattagcaggcagaaaatctgaaagttgatcacttgcaactcctcaccccttttcccttgaatggctttgagagatttcgctaggaattcaggatggaaaagtcagcatagcggagtaacatgttacagggacactgtaacctcttttccttggaaagttccctgtattatgagacaatgacatgtcattaacgagttacatttgtcttgttttcaccaagaagatggattgaatggccctcaaagatcttctctgagttgtaatgatatggtatcatctgagtcagaatgctaccatttacaaacattttgagtgggtatttggaatcacttgttgggtcctttttcttatcctggttgtgtttagagaacaggcttggtcagattcaaatagatcttacactttgacagagaccggaatgcccattgatgaaaatactttgcacagaaggactgctggtgaggtagaagttctcagagagctctggactcctatgtggctcatgtggttaactataaaatcggaatttcaaaagccctcataaatttataagataacacggccgggcgtggtggctcacgcttgtaatcccagcactttgggaggccgaggcaggtggatcacgaggtcaggagatcgagaccatcctggctagcacggtgaaaccccgtctctactaaaaatacaaaaaattagccaggcgtggtggcgggcacctgcagtcccagctacttgggaagctgaggaaggagaatggcgtgaacccaggagacggagcttgcagtgagtggagattgcactgctgcactccagcctgggcaacagagcgagactccatctcaaaaaaataaaaaaaaattataagataacacaaataatggttttcaatcatttgtgcataagagcagctattgcacactacctttcccagggtggacaaggttgaatcctgatgtagctaagaaatgtcgcaagtcatagttttagtctatgcaactttagtttctgctaaaatttttcttgatgaatttttagttatatttatttataaaacatcctatattaagaacacaacacctacaacagttaaggaaatacaagacctaagaaggcttcaaaacacttctagttattacgtatcacctaaagtacactatagccagataaatattcgcatcatgtcatactctttgcagataaccatggtgaagaatgtccctggaggcgaaggttgcagtgagctgtgatctcaccactgcactccagcctgggtgacagagtgagaccctgtctcaagaaagaaaagaaaagaaaacaatgtaattcaaagtcatgtaaagttatttaatattgttttctctctgtgttggtcttgcataattttctcctttgatgattttcattattcacaagaactttgaaatgaaattgacatttgttttcttaaagacatttctttttttatggttgaataatactccactgtgtatatgtactgctttttctttctttttttttttttaattacactttaagttctgggatacctgtgcagaactttcaggtttgttacataggtttacacatgccatggcagtttgctgcacccatcaacccatcatctatctatattaggtatttctcctaatgctatccctcccctcaccccccaccccctgacaggctctggtgtgtaatgttcccttccctatgtccatgtgttctcattgttcaactcccacttatgagtgagaacttgcggtgtttggttttctgttcctgtgttagtttgctgagaatgattgtttccagcttcatccatgtccctgcagaggacatgaactcatccttttttatggctgcatagtattccatggtgtatatgtgccacattttctttatccagtctatcactgatgggcatttgggttggttccaagtctttgctattgtgaatagtgccacaataaacatatgtgtgaatgtgtctttatagtagaatgatttatattcctttgggtatatacccagtaatgggattgctgggtcaaatggtatttctggttctagatccttgaggaattgccacactgtcttccacaatggttgaactaatttacactcccaccaacagtgtaaaaggattcctatttctccacatcctctccagcatctattgtttcctgactttttaatgatcaccattctaactggtgtgagatggtatctcactgtggttttgatttgcatttctctaatgaccagtgatgatgagcttttttcatatgtttgttggccacataaatgtcttcttttgagaagtgctgttcatatccttcacccactttttgatggggttgtttgatttttttctagtaaatttgtttaagttccttgtagattctggatactaaccctttgtcagatggatagattgcaaaatttttctcccattctgtaggttgcctgttcactctgatgatagtttcttaggcatttctattgttcctttaaactgtctggcactcagcttccccctaaagttttttgtttttgtttttgttttgaggcatagtctcgctctgccacccaggctgcaatgcagtggtgtgatctcagctcactgcaacctccgcctcctggattcaagcaattctcctgccacagcctcccgagtagctgggattacaggcatgtgctggcatgcccagattatttttgtatttttagtagagatggggtctcaccatgttggccaggctggtcttgaaatactgacctcgtggtccacccgcctcagcctcccaaagtgctgggattacaggcgtgtgccaccatgcctggccagttggttttaaaagtacaggtggaaaataactgctggttacattgaaacaacagtatgttcttcttggatgaatatacttgaagaacacaattctattagtttcaggaaaagtatatcaaagttataatgcaccctaagggtttcaggatctgcctcccctccccaccccggcagacacctacatctgaagatgctcaagttattgaagtaaaatggtgtggtatttgtatataacctgcaaatatcctcctatatatttaaaatcatctgtacattacttataatacctaatactgtgtaagtgctatgtaaatagctgttacactgtattgtttagggaatgatgagaagaagaaaagtctggcatttgctgttctatatattttctttaggtactgtatctacaccctataaaaagataattagtatttttatttattaaataacgtatatttgatcccaaatgcaagtctttgttcagttttcggtgtcatcatgccaaatctcttggacatttacatcataggaaacaaaataatgagcctacttcttaaaagctccatccagagaagatgaaacatttcatcagctcagtctatttatatcattctttctagctcctcaggacctaataactaaagcttaaattcctttgtatgacctcctactccattcatttatttcttcaatcagtaccatttgtgaagaccatttactctgtgtcaggcacgctgctatgtgccagagagccaatggcaaacatgtgctagggatagacactaccgccaaagcttttccaggctggggggcatatgatcattaaattaaaacaacacacataatttgcacttgtccactgtgtgatagagtgcctggggggagaagtgcagaacgttatagagcaagcaacagagagagagagctgtggaagtcagggcgtgggggtcagggaaggcttcctggttgaagtcgcattttctttgaagaaaggacagtatgggaaggctgggtgtctggaggcaggtgtatttctttctatatggtcaaatatttgtttcctgtagaattccattaaatgtgaaatatttgtagaatacagagagacttttttcttggttaatgaaaagactgctgaggatattccataacatttgaaagaaatcttacttatgaacaacaaatatataaagaaagccctcctcctgaaccttttcaatagactttttattttgtagagcagttttaggttcacagcaattgagcagaaggtacagagaatatccacatgctctctgcccccaccatgcacagcctctcccattaccaacatcccccaccagagtgggacatttgtgacaagggatgaacctacgttggcacatcatcatcatcagggtccatagtttacatacgcttcacttttggtgttgtatggtctatgggtttggacaaatatataatgacttgtatctatagtttcatctattgctttaaaataacttacaccaagcaggacacaaaattgtccattcagggtcacagctaattatttgcagtgtcaaagcattgattggtaaagttaaggtctatggtgggtttcctgactgatttctatttcaaatgttcagttccattgttagacactagtttggtatgtattttggaaattgtagactgactagttccttagctgttccatgccgacacctggctatgttgaaggaaatgagtgagatctgttcctgttttctcttttcatatggtgggatctagagaactagtttccatttatctttattcttcccgtgtgtgttgtctttgcatgaatgatgtgttttctttacttgaagcttttgaagagttatctttctttaaggaaaaatcaaaaggctagaaatgaaaagacttggaaaatgtcattgaaataacggctgggtgcagttgattgaacttatataaactctttgaaagccagattgactagcattcatgtttgatctagttaaaccaataaaatacaggatgtaatctttatataattacaaaagtcccactgtctaatcctacctggaggttacaatgatggttctagaggcaaatgtgtttctagcctaatgtactttgactctttatctttgttggctttaagccagaacaagactttattgcaaatactgttattttatctttgttgtcaaatggcttaactggtgaaggctattgtaatctgacgaaggacttctgctggggcagggtattgaaatatactggattcttgtatttttttattgctcttctgctcaaagagtactatatgtaagcaacataggtggatcgtgatggggtagcatctggcctaaacaaagtggccagcattaatcgggggtttattggcatccctgatgctagtgggcagggttcttagaagttcttagtagagataaatagcacagcacatgatgactgatacaggtaaaagcacagaacggctgcaaaaccttggcatgggggcaattattttaagaaaaacaggaaacccagaatccaaaaaggaactatggatgcattttgagggcaaatatatatgtgaatgcatggatgcgtgcatctgtgtgtgtgcatgcatataaaatttccttgtggaaaaacctcacaaataaatgcaaaagatgaatgaggggcttgagaatttttgcaatagacaaatgatcattgaacctaagtgatactaatagttgctaaaattgattttaaaaatggtgaacaatccgcaattagataaggtaaaagagacagactatccacggtaaaggaaaataaatggccagtcaggaaattaaagtaaaaataccaataccattgcccactcatcctgttggcaaatgttgaaaaattgcttccacccaaggaaaaaacagaatggaaaggcatccttttactgcaagttttatttgtattttagtattgctaaaatactgtatcttagtattttcaatactaaatacttttgagtctcactataataagactgaatcagttagtctagggtgagtattatccgttgtgagctgggagatattaagtctaggattactcccaaactgctaaagacaatataatggcaaatgacaacaaaatcacatcaataataacaaaggattttttaaaaatcctgagccaaacattttgataaatactttacaaggattatctttttaatcatcccaagcagcctatgacatgctgtcctcactaattttaaaaaatcattctaatcataataattgtttatgcatgcttgccattgccccaaatatttctttgtaatgacagagtttttcattttgtgattagtagaaaattttgcttgaaatgaaaatgccttgctcaacgcaatgtattgatattaattcccaattcaaaataggctctgtggctattggctttcttctcattttgatgggtgtgtataagccaatggtatggggagcattgaattgcaggaaagaaggagagttggtgtggggcagggcaggagggtttacacttgggaaggggaggttgggcagctgaagacaatctctgctgcatcctttgtgcttttgttgttgaagtttggccattcaacatacacagtagaagggaacaaaagaaagctaatcaaggtgtgtattagtctgttctcatgctgctaataacgacatacctgagactgggtaatttacaaagaaaaagagatttaatggactcacagttccacatggctggggaggcctcacaatcatggtggaagacaaaggaggagcaaagccatgtcttaaatggtggcaggcaagagagcatgtgcgggggaactgccctttataaacccatcagatcttgtgagacttactatcacgagaataacatgggaaaaacccgcccccatgattcaattacctctcctagggtccctctcacatcacatgggaattgtgggagctacaattcaagatgagatttgggtgggaacacaaccaaaccatatcaaggtgtgtcctgcacagggcttctcaggactctaatcctttatttttgttttaattaactctctgatatttgctaaattaaaaatattatttccagagataaaatcttgtgtaatgaaaatcctgcaatctactttctatttacctgatctcccctcctattctctgctccaccccatccatctgaactgctgctacctcaacatatggtatttaggactgttggaccaatcttcatctctccttttaaggttataaatctggaaattccttcaaaatcgagtgtgcatcttgttcctttcttcacctgtggcttttcctgttgtgttgtttaccattgaggttaatcactggctttgtcactctgcatattttacttggtttccctgactacaggtttcttaactgtaaaatgaataaatgaagcttatgtcattttgtgggatgattacatggggtgagtattaaaacatcaaggcacatttctgccacatagatttggccactataataataataatagtcaaaggtgtattgccgcgttagtgatatttttgtcaacctgttgacaacagtttctgtgcctacttttggaaccccaggcaacagttgccatgcccacttttggaaccccagtcactcttgcatggcctcagaaatgtgccttctctgtgaggaccaagagctgccctcccttgctaatgtcttacagacaggtaaagaggaaacatggaatcctgtccccagggaaaaatctagttgagcaaccaagacacagacaaaataaagcatatcattcagcaggagagggtgtgataaaactccaaagaggaatccagcaagtgcagaaatagctgagggtcccctgatctcatccagagataaggtcctgcccatctgcctaggaaaagaaacatccagaagggaaggaggtctcacctgtgcccatgtcaaggattctagtccaaggagcagaaccccactgacctgactcaagaagactcaaaaccttccaaccaagatggtgctgaaaaagaccttcaggaactggctttgacctagtctccaaggtctgaggctgtccacttcagccctgagtctctttagaaggtgcctcattgcttcccatcactggttggggaggagcttggaacactcaagttgaatccaggatgtgctcagacaggtgtcgtccttggaagtcctggcaggagccaactctgcacaggggaagcaggggaagctttaactatgaaacccctctagcatatagccctaatatttacttcttctcagccttaactcccaataattccttcacatacctaggattttagccaatcctgtatgaatctacacaccgtgcaacatgctgaggctggctgtcatgtaggaagttcttcaaagctgccctgccccagcccccagcttctgcatgctcaatgcctggcccctgctttttgcagttgtcacactgtttatgaccatcccctagtcagcctggcccctctgaacttttagcttataaccaagccaatggctccctttataaaatttcagttttataaaagggtatgttatgccctcttacatgctttctcctaacatctcattttccggtaattcaaccacgcccatcatttgtctggcattggcctctgcccaatctaattatttatctgatgtaatccctgccaaaaatcataacgaacttcaccctaagctgttcgtatgcgtctccagcttcagaccttactgtctctatgggggacatagatgtggggggagagatgagggcccagatgtggacgtacggaactcagtaggtggtaggtaggttcataggagattggctcaaatcctaagaatgtgtaggaattattgggagttaaggctggctaaaatcctaagaatgtgtaggaattattaggagttaaggctgagaagaagtaaaaagtagggctatatgctagagaggtttcatagttaaagcattcatatgggaccgagatcttttaagccaataatcttcacattgaagaagaagattgccaatcctatacagctgagatttatttagtggtttgggggggatcctataattaagctattactgggaagggacatattcagatatgttattggcagtggatgggcaaaatgtggtatatccatgtagctgaaactgacagtcaaaaagatgaagtaccaatatatactacaatgtacatgaagcaagattgctgtagcatttagcatcaagaagccagacacatattgtatgattccatttatataaaatgtccagaataggcaaatagataaagacagaagcagatttagtgtttgccagggtaaggcaagtagtggggaagacagaatgggagtgattacaaataggtacaggtttctttttgggctggtgaaaatgttctacaattaaatagtggtgttggttgcatagctttctgaatatactcaagttgtacaatttaaatgagtgaattttgtgaattatatctcaataaacttgttataaaagtattttctaaaagatattttttggttcaattttcttttctcataactgcaaacatatatcatcttgctctgtcaatactggtatccttcatattaaaagtttagacgttcaaacataggaaatgggagattttgtttcatctccaccttgaacttcagagaactagaggtcatgacattttagctattgggtgatggtttctgctagctttgctacctattccggcctagcataacctgacttaaaagatcccaaccagagaaaaaaaaaaatcaccaaaatcttagttatgtggaatacagcaattctaatgttcaggataataaatcatagtacaattttatttatttatttatttttttgagatggagttttcctcttgttgcccaggctggagtgcaatggtgtgatttcagctcactgcaacctcctcctcctaggttcaagcaattctcctgccttagcctccccagtagctgggattacaggcgtgtgccaccacacccagctaattttatattttttagtagagacagggtttcaccatgttggccaggctggtctcgaactcctgacctcaggcgatccacccgtcttggcctcccaaagtgctgggattacaggcatgagccaccacgcccggccccaaatatttgttatatattgagtgtatctattgtttcatttagttaccccagtggcctgatgcatgagatattgctgttaggcttgctttactgatggataaactgaggcatggggatgttaagtctcttgtctgtaatcatatgttttgtgaaagagtaagagaaggcttttcacgtgggatctgatgtagtttggatttgtgtgcctgcccaaatcttatgtcaaattggaaggacaggcctggtgagaggtaattggatcatagaggtggatttcctcctggctgttctcatgacagggagtgagttctcacaagatctgatggcttaaaagtgtgtggcacttccctttttgctctctctctctctctcctgctctgccatggtaagatgtgcttgcttcccctttgccttccgccatgattgtaagtttcctgagcctccccagccatacttcctgttaagcctgcagaactgtgagtcaatgaaacctcttttcttcataaattacccagtttcaggtagttctttatagaagtgtaagaacagactaatacaagatctttctcccaatcccaaactcttatttctgtaaattggttgagatcaaaagcatccacaatgcttaagttgtaaatttctcaaaactgctgactattggcggaacgtctagtgttcatttacctgcttcactgctcaacacaccatcaaagttgcctcagaccctttttcatttcagacagcttagaatctttagtattttatatgtctttgtttacatcatgaaatcgacaacaaaatgaaacttacaaacacattttctatcattggaagggaaggacagcaggttttgcaagattgggtatttgttaaaatgcaaatattcaaaaattatatgcataaattataattttaaattagaaatctgtgtatgtgtagctttctaatggatcaatatttttcctttttctttttgcagaacaatggttccctggtttggtgccagaatcacaagcaatgttctaaggtacgtttcctatacctgtatgaatggtgcaaaaaacttttaattttggaataattatagattcacagtaagttgcaaagacagcacagagaaatcatatatgcccagtttccaccaatggttacactttaagtaattgtaaacaatatcaaaagcacaaaattgatatgcatgcaatgtatgtatatgattttgtgacatttatcatgtgtaagattggatttacgtagctaccactgccatcaagatgcaggtatcaatggttctatatactactgtattttattgttgtttgtaattttctgttaaaaaacattaagaagaaaatgccctctggttagaccagagaagatttaatgtattctatttatacttatgttattttgcatgtattttggtttctttgtaggaattgctggttaaataatttgattttttcattaaagagtctctcttccatttttgagtattctttgctgcacactaaagtactataaactttattatgttacttatttatatgtttgatataatacaattcttacctcaatcccaatacaccaaaatctttgttttttaaatatatatatgatggtactctagctccagtctgaagtaggtttcgtaatcaggttatgtaaatgagtaaagtttacaaagtttgctaaaaacattggagcaaaactttgggatcataatagtgtttcataaaattcatttcatggatattacttttagtcctaaaatagaagtacaccttattttataaacaacaagtaatctaaggaatatataataatcttgaaatagcatatttatgaaaaggattattttgtgaaaggtctttcaaatacatacaataaattattatagaataatattcctaaaccaaaaactttgttctaatgatgcatttccacaatcatgctcactgaatacacatgagtgttactttaaaatagaacagagttcctacgtgaatgttaaataatttgatgaagataagctttgcttatctctgactgtctagatactaggcaggaatgaaatgcctggttacggtccacttactctttttatgtaatgtcctaagcatttgttctgtccagacattttctggtattgattatattaattggtcttcaactggaattttagataactttttcatgccatcattccagataaagcacataatgctatgaggctgattaaatttcataagtattctttttgtgcagtgtcgtattaatcgtgtattataggaatgataatttgttacattggtaatacttcttatttaagcactcattttttccatattccatcaagaaattatcttttgcagacttataaggaatttgattagaacaggcttatttgaattactttaaaattattgcagtgaaagaaatttgtacactagggatcatagatggttaaaccatattttgcaaatgattaatcaaggctgccatgagggactttgaatttcacaaggaaagaaagcaatcctttttgtcagaaagcaaaaatcaatcaataagtcacaattaagcccaactgaaactctggaatatattacaaagctgacagaaattgaagggttgtctttaacttgggatccttgggaatctttgggaatgaatcttgcttattaatcagagtttgactcctttggatgttagcatgactggatacctgtgcagataattacaatttgcatttcttttgggattcatgaagtactaggtgggctttttctcttaatgcgtaggttaataaggttactggtaatccgtagtcacatagtcatcagttttacaaatgggaaaattcaggcatgtgcatattgatgatggttctgtaatcactcaacaaaccagtagagacatatacatccctgtcttctacactgtgtttcttacaggccaacaactctagaaaccagtttgtacaaatatagggagagaaaagtcagaaaactcagaaaagtcagaagcagtgttaatgctacaattttccgatgatgtattttaaaagattaggtttgcataatgttttctagaaaccacacactttttaatcacttctggtgaccatctgcaaagcctgtcagctcctccttcagagcccctgtggaatagatctcatctaaccactcttcccacctccaacctgccattctctctgtctgggatgaatccaagagcaacccgatgggtctcctagcttccactctgaccccaaacaatcacatttcctcatggctgctggaaagacccttcaaacatataagtggcatcacactgctgtctaccttaaacctaatgattcatttccgtctcactcagactaaaatccaaagccctattctgattctcactggctgtctcttgactgcctgtgctctgtccccaactttgatgttgtttttgttgtttgttggtttttcgagatggagtcttgttctgtcacccagggtggagttcagtggtgcaatcttgggtcactgcaacctctgcctcccggattcaagcaattctcctgcctcagcctcccgagtagctgggattacaggcgcctgccaccatgcccggctaatttttgtattttttagtagagatggagtttctccatgttggccaggctggaagaaaacattttaactgtagagattcgtctctgtgcttcatctgacttcgggtatgctgggttccacataatggaatcagcactatgagctcaagggtctttagcccctgcaccactcaaccctagagaatatagaagagtgcctattgtccagcacaggtctaggccagtggttctcaaccaagggcaatttcctcccccaggaacaattgccaatggctggaaatatttttgattgtcacagttgggagtgaggagttactggcatctagtgggtcaaggccagggatgctaataaagaacctatactgcacagaaaagccctcccacagcaaggattatctggctccaaatattagtaatgctgagattgacaaactctggtctacacatttgtgaagttataaaagaaattaagagcatagtcctcagcagttttactttatttatgaaagaaaataaatgtgtagtttactgagtacaaggtatgtgccaagcacctttttaggggctcattatgtctaggaattctgattgtcatcatgtactctgtaacactggtgagagagattgctctttgcctgctaatctggtttctcctcttctctgctaatcgaaagctcattcctcacctgagcacattgtcaccttgtgttaaacatctatatttccccaagctccattgcttctaaatatggccagtaactaatttcttgcccaagtggaatcattgtgaagaaatttcaaaatgcctcttttaaagggaactgatttagctagaaaatgcactcatttgttctcttccccttgtctttccctgcttcttagagggcataccaatggcaggggccccagcagctctcttgggccatgaggtacttttgaggatggagtccaggctgagaataactgacaagaaagatagaaggaacctggctctttgatactgtggggccccataccagccttgcacatgaagaggaaatacctttctatcttgcttaagttactgttatttcacatttcttttgttctatgaagatggaattgtgtgtgagtgaaattaatctcggcttcatcttggaatgaccaccttcatgtcatagatgctcagaaaaggtgggtgactttcttacaaagtcactttactaataagtaccagtaaatcccctacacaggatttgaactgagttccggtggaattaaaagccagtgattttctcattgtatacctcacacatatgaagtcttatagaataactttttaaaagttatgaaagatctcctgctcaatttagtggttgattgtcttgatgcactaggttttttttttttttttttttccacccttatagctactgtgaatagtgtaacttcctggcaaaactgtgacccaattctagcaaatgagccatattttctctttcttgcttttatgttcctgttgtctggtgggaagtcagaaagatacagcctaaagatggcctactcttctgattcagcttcatttagggatacatagtagattcccggagaaatagattccttagatattcctccgttaaggtgatttttcttttcttttctttattttttatgttgagagaacatttaacccataagaatgtggtatgcccttggccactccagaataaactgttcgcaaaactgacatctaaacacagtttcagtctcggatgattcagggcaaaccatttatttattaatttagagacggaatctcgctctgtgtgccaagctggagtgcagtggcatgatctctgctcactgcaacctccgcctcctggggtcaagcagttcttgtgcctcagcctccccagtagctgggattacaggcacctgccaccatgcccagctaatttttgtatttttagtagagatggggttttgacatgttggccaggctggtctcaaactcctggcctcaagtgatctgcccccctcagcctcccaaaatgctgggattacaggcgtgagtcaccatgcctggccaagccttttaaaatatatcaaatctatcctaaaaagatgcctttacaatcacttatttttagtagttcaattttagtagtaagtaagtaataagatcacctatttctaatcaagaaagtaaatatacacctttggcataaaaaataatgtattttaaaaattctatctaaatatgttttgcaaacaatttttatcttaatttcctttttttcagtccaagccacactaaatactttttggaatgaaatattactatagtaatgtaaaacatactgataaaacgtgatatatttccattctaataatatttttaagttggtccaatcttaacaatgtacattacttttattttattttatttgagatggaatttcgctcttgttgcccaggctgtagtgcagtggcacagccttggctcactgcaactctgccttccaggctcaagtgattctccagcctcagcctcctgagtaactgggattacaggtaccccccaccatgcctggctaatttttgtatttttagtagagacagggtttctccatgttggccaggctggcatcaaactcctggcctcaagtgattcgcctaccttggcctcccaaagtgctgggattacaggcgtgagccaccatgcccgacctattactttaagaacctattttcattaacctttctcttaaataacaaattactccatgccaaatataatgtaaatcagatcctattttttcccatatattataatgttgtggctgttcagcccttttatttatgtttctagtttaacattttctttaaatgcatttcatttgctcgttccaatagagtctgattaatcccatttcagtagatactcactgagcatctactatgccctaggccctagtgataaagtgatatgaagggtgaacttggtctttgcattaattttttacttttttgctcactgagaaaattcccagatattgttacttcatccattcttaaaaattcatgcaatattccagcctggggcggtggcccacgcctgtaatcccagcactttgggaggctgaggtgggcagatgacaagggcaggagatggagaccatcctggccaacatggtaaaaccccatctctactaaaaatacaaaaattatctgggcatggtggtgcacacctgtagtcccagctacttgggaggctgcgaaaggagagtcgcttgaaccctggaggtgaagtttgcagggagctgagatccagcctggcgacagagtgagactctgtctaaaaaaaaaaaaaaaaaaaaaaaattcatgcaatattccttatgagtccccattactgtaccaatggggacataaccaccttctcccccttactttgcccattagagcatttgtgtacctttagaatccatttctgctttttctctttgctaatctcacaattctaactcttttccatcattctgaagttcctctgtactcacccattaacggttaatatgtgaattacccagtttctgttaggctctgctcatggtcttaaggctcaattctcatgttcgtaacttatttggtactctgggatggaaatatttgatgaagaaagagaaaactatttgagtgagccacagacacatggatcctaggactgactatgttaagagttagatggctcctctcagtaagggaacataggtgatacagaccactgagatcattgtttgcatgaaggatggagagaagaattctaaagctagagagaatatttaggaatatccagtgcaattctttcattgtgcgcttcaggaacctgaggcctgaagcaatgatatatccagccaaagacagcctccagctcagaggaaatgcttattcttacattctatttttcattgtatgtaatttccctaaaagcccacttaggaatgatttggagcatttgacaggaaattcaaattcatgggcaagatgccctggtgtttagtcatagcacagagtcaaaatattgtaatgagccatgttaacatctatgtttcccagtggctttttctggtagaggaggacaaatatccttctctctacccatcctatgttcatgacttaggtccttttaacacaagatagactaagaagagaaaaacttgcaaatttatttagtaagatttacatgctgtgggagtcttcctaaataaatgaagactccagtaaatggttaattctgtgtatttttatagtagctttgatgaagagtgaatactgatggagagatatgataggacaaaaagggtgtgatctagtgtagataaactggggaatttagcaaggcctgtttgttcaggttcctctctgtgacccttcatcttcagagatgagcatgttcctttcttccagggatcgggaggccctcacatgagtgtcttctgacctgcttcttgggaatgttggaaaagctttcctaagctgtatgccctgcatcggggagaagcatatgtgtgggtgaggaggggaggtcagagagactttcctgcttctgtttttttaatatgccaaggtgccgtattttgagtagtgtgtcctgaatcccatcatccttttcaatgtaacttttcattaaatgcagtgttctaggataagggttagcaaatgacttctaaaaaaacaccagatagtaaccatctttgtctttgcagcccataaagtatctgttgcaactactcaactctgttgttgcagcacaaaagcaatagtagaaaatacatagaccaagaagagtggctatgttccaataaaacattttttgtagatagtaaaatttcaatttcctgtaatttttacattataatattttacttattttttttccaaccattgaaaatgaaagaaccattcttagcttactggttctacaaaaacagatggcaacctggatttggcctgctgctgtagtttgtcaacccctcttctatgacattacattcacacagacaaaactaaacccaaacaaaacaataaaaatgcattcttctgacaatacaaagacatatcttaaaatatttaaagtcaaacaaaaatggacagtttctgacatagcttatagaacattgtttgtcaaactgcagggatttgaaataatgaatagtaaacaatagtgaaaaaaaaacttcaaataaatcacagctaatttttgaaaatccagtgttaaaatgtgatgatcagagtcaagaaaaattgtgaaagatttgaaaattggcaaaagtaaagattatttttctctgtattgcacttctccaagttctgtccagtgttcagtgctttgaactattttcccactctgcaaatggtagaaaattgataatgaaaataactcttgtccatgaaaatgcaaatacattttgtctagtggaatgcacttgatgcttcatccaggaatacaacattttgcatatatttgtaaatccatttcagcaccagcattccttattgaccctattcatccatccatccatccgtccatccatccatccatccatccatccatcttaatctgtctatcatttatctgtctattgtctatttatctatgggatttttcctttgaatcaaatgtaacatatgactatttcttgagttaaataaaatctttggtacatttccatctgatatttgcatgagtcttgtcttcactttataaaatatttctccactttgggagtccaaggcaggtggatcacgaggtcaagagttcaagaccagcctggccaacatggtgaaaccccgtctctactaaaaatacaaaaattagccgggtgtggtggtgcacgcctgtaatcccagctactcaggaggctgaggtaggagaatcacttgaacccaggaggtggaggttacagtgagctgagatcgctccactgcactccagcctgggcaacagattgagactctgtctcaaaaaaaaaaaaaaaagatttctcctttaactttcagctcagagttatgtttcaaaaccttgcatctaacaaacaatggcatgccacttagtaacaaccacctatctgtggggagcctgcatgcttatctttctgcctttgagtgccagaactcactggcttgacttttgttccccatttggtttggagtgtatgtgttgaaaagtggtaatttagggcccagtcttggtgccttggcttacagctttaatctcagtgggagttcagttcttataagggtacaactcctaactgttagtgattttccagctttattcagaaccacgtttagaggtgaggaagattggttttgcttgtgtaaaaatctggacagcttcatttgccatctgtgaaatttatcgagtgagggccaaacctctgaaacacatctgaatatgactgtggaaatttttgttttgtatgagatgctttctgtgatttatgtggtaatgactgtaaatccatagagcccaaggaagacatttcttaggagcaaaatgaaaactcagacatacatgaaaatgcaccatgccccagtacccaagaaccaaaggtgaacgttttttatctgattgcaattctaatatgtagtggatcaaaattttaaatgtttagatactttagacctgttgcaatacttactgatgcttatacaatatctcttgactttatatatgatacatttcaagaataatgttgctgttcaccaagcatctgttgtccaacttattgatctcctttggagcaaacaatgacttcacagccaaatcacgtttgacaatgatttcaggagaagtgcaggcttgtgtaattcaaagagagagatttgtgcagaaaatgtctcaagtcgggtataattaattccccttcattttggatattaatgttattatttccacaagtacatgtctttacttacatgagatcatgtctttatttttcaggagaaaataaatatgatgtgagaataaacattagaagagataagagaaatattctattatttccttaaaccaacattttggtcttaacatttgtgtagaatgcatgcgaaaagaaattgttagtgtgtgtgaggtttcaactagtgttcttttgaaaaagccatcttatgtacaatattatattagcatgattaatataaaccactggatgtaaatttctccaactgtcctatagcatgatgccacaagataattataagtagccttggcgttttgtgcttagtaagacatgaagtctctctctctttctctctctctctcttttttttttttgttttttttttaaagctttattgctcacacagaacctgtttggtagtttcttcacacggatgtgtgtgacaacagggtcttgctctgttgcccaggctgaagtgcagtggcaccatctcggctcactggatccttgacttcacaggctcaagtaatcctcttgccttagcctcctgagtggctgggactacaggcatgtgccaccatgcctgggtaatttattattattattattattatttgtagagacaagatctcactatgttgtccaggctggtttgaactcctgagctcaagccacttgtacacctcggcctttccaaagtgctgggattacaagcatgagccacggagaccggcctgaagtctgtcttaagggagttgatggaattgaaaattaagttagggctggacgtgtggcatgatttataagtaattcatccattgttgctctagaaggacattaaagtggctatcatctctgatgcaaaggcagaaatggaaagaaaaaagaagagaaaaaaatgagagcctgggaaaaagataaaaaaagaactcacaaatagctacataaacaactagtttcaaaacaccatttcttaaatggccaggaaatagtcctgagatttttgagaaaccactgaaggcttccagcagggtcccttctagtgataatgcaggtggatggatgagttaatgatttaaacaattagagatttgctgcaaacttccatctgtcactgccccctggaatgcagactcacagttctaattggagcctccagcattgaaggcggcatgagttggtgtcactgatttgcttcccctgaccactgtcattctcatggtaagcgttttctgccctcacgctgagaacttttatcaaacatattagtgtgcatttgggtgatcattagcctgtggtagctgaaacattccaggttattttagcctagaaactagcctgtctgctgaaagaacatgcaaagcttcctgctaagctggtacacaatcaatatataagggaaagaacgggttcctatttagatttaaatccaatatgtgacaagttaatagctcagtgtgtttctgcttttccatgtcaattttacgggtgtgaaagactcttccacctgctataaacttcaaaggaaaaacatgcggaaggggaaatgcacctccgtgtaagtctttccctaatctcttacgattaatttcttcttccatctgatgaaagaaaatgcaaacgaaatctcttatttggttcacagttgaagacgagttccataaagctgcctttagaaagggaatctgttttgaacatatgaaaaccatctgagtcaagatgcattacatggtgattacagtctgacagatgttttgaagttgtaatgtgttcatcagaaagcacgcagagcagggatgagcaccgcttgtttgaagatgttgaggtttattctggcaactggaaaaatgcaccaatgctgattgaagtttggggacccttatatttgagaaaggagacagaattggatttcagtctctggtagatcagcatttgtgggcattgaacatgagattgtatcatgttgctttatctctgccgtgacagtcactgtcaaaatattctctactggggtagaaaactctcacttgaatttaaggggggtccacatttgcttttctatgttcataattttgactccaccttatacgtaatcgttggaatgaggttcaagtctacttgtctcccgaatcacacataggagttcctcttagaaaacctaatttgtgtttgtgcgtagtctactttggaaacttttcatttctctgtgtttctgaaagagcagtcattgtaggaaaataaatggaggttttaatttaaactcgatttttaccaactgggtgaacatagaaactcttgctgtctcacttgcctgaaaaagagaatatagactaattgtttgaaactaaaacaatttgcctttctcaagagatcttttatctattcaatggggaagaacctgccttgccccataaataatgacattcaaccaccttggcatatttattttccaactaatttaggtctaagaatatccttgtaagattcactactcaaaacatgatgttctttgggtaatcagtgtgtgtgtgtgtgtgtgtgtgtgtgtgtgtgtgtttactggattacaccttctgttttcttctgggttggaaaatgaaatcacgttttctgaggaggatttttgtcagatactcccttctccctatttgatgcatatctatgcaggaagtgggttgcttttttttttaatatttatgtatttatttatttatttatttattttagacaaatgtctgttaggacctttaatttcacagtgaatgtcagagctaatgaaagttttgctagctatgaagtgacaatgaagtataagcaaagccaccaggcatctggaactttccaagtagtagaatatgaaactcatcgtatcctggtggtaccaaaagccactggagagagacagtatttatacctgcctgatggatgtatcacttccaggtgctctagaatctatgccttgattacacggctaagctatgtctttgccatttcaaatcttcctttaacaaatggcttttgctgaatggtaagttgctgcaatgcaatatggatgataacctcagaaattgtcctacaaacctagtcgttggggctgctctaagaaagttgttgaggacattggtctcttatgtcatgccattttggggaggaaacttggagagatattaattaattaattatttaatttttttttgagacgaagtctggctctgtctcccagggtggaatgcagtggcgcgatgttggctcactgcaacctccacttcctgggttcaagcaattcccctgcctcagccttctgagtagttgggattacagatgcttgccaccacacccggctaatttttgtatttttttagtagagtgggggtttcgctatgttggccaggctggtctggaactcctgacctgaggtgatctgcccaccttggcccccaaagcgttgggattacaggcctgagccaccatgcctggcctagagacattcattctgattgcattatcagtactaattgtgcctccttgagaaatgggtagatacttttggcctatggatactgtggattttgcagttaatagtgttttcctcttacaattggtctttagaaagctaaaacttaaatcaaacagcctgtctttaacaagtgtgctgaaattgatcatatgtatttaggaaacttgctttatccttgacagtatttattttctccccattttaatttccctttatctcatttttttttcactcacttaagatgtgctttccagctgtaatcatatgtagctttgtaaattgtcttgaattattttaagagtgagaaaggccatagataaatgcacacatccataaaataataaatcggtagaaggatatcatactgtggctgcgcatgttgccagatgagttgtttagtctcttgaacccttttatccagaatttcatggttaaacaaaatgaagtgacaagacatctatattcataccaaagttctttcagctgagaagtgatgattatgggaaaagatttactggaaaagagcaatgggagcctcttgtaaattaggtaatggctgtaactgagcaagaaaaatttaagagaacacaacttaaattatgaaaacagggagtgcggtagaaacttgtcctgatgggaaatgtggtagtggaacaaaggtggggcgcttttgtttgtgtgggccatgggagccagaggggtttggccctgccttcacagatctcaagtcataaatagcagaggtcaaagaatcgtctttaaaactacacaataaagaaaggacttctctcaactgggtcttttcagagcatagctaccaatgtgggtaagttcattttccatttgtgtgggggaaaatgacttaaagtgtgcactttgtaaatcttgctcgtgcactctttctttctcttcttccctcctgcctttctttttccttccttccttcccttcctccctccttccttcctttctttttctttctttctttctttctttctttctttctttctttctttctttctttctttctttcttcctttctttctctttctttccttccttccttccttccttctttctttcttccccttctcctctctttctctctctttctctttctttctctttctcttctcttctcttcttttcttttttctgttcaattgttccctccctccctctctgtccctttttctctctattcttatgggtggcaaatgtttatgttggtttccatgaaagactttctctctgccttaagttataggagccccagctgaaaattttaagcacagagaggtataatgaatggcttctggcttatttaacgataatggaatggccactctgtcgatactgtgttcattatattaatagcaatagctcagttggtgtcaatgtgtatattcctgtgtgatgacaggttgaagaaaacgcagggtttaaataggaaaatgttgctgttggttagaaaattgggcttatgcgaaactgtctaattaaatcatactcattttaactcattgcaagtgactaattctgtgtcaaattccacataaggagcactgtttgcagggagaactgtgagagccgcaggggccaggacaacccctgaactgtgcaagcagagatcatttaagagttgagctgcctgcagatgcacccagattcagccttctgcagacttctcttgtggggctggaacggatccttgtggagaggagaagcgagttcccgagatcttccttggggacgcagctcctctggcttccgcttgctgaggaaggtgggtcttttgatggctgcaagtctccgagttctcacagctgaatggttgaacttggtcagtcgcagatgaatgaacagtgtttcccaagagaaacttcacaatggcttcgggactattaagctgtgaagattcatgctttcgtgtttgggagtgtgtgttcagcaacttttcctcggggaaggcggggggtggggggcaggcattcgaggttggctttttacatccaactgtatgcacattttccctttttgtatgaggaaataatgcctgcactaaggataaccctcccctcctcctaaatccttccacaaaaagatacttattaaggctggcattctgaagaactaaatgcttctttaactttacttcatctgcttcagtgagcacagtgtaccgactctggggaattcacattacggccggcaagcagccttctctattctctaggggctctttgggcacagaaataatcccttcctagaatcttttgaaaaagcaactgaactatgcaggctaatcaactgtaaatcttagccctcttggatgaagcagcaccaaaaagtcccctgatgaccgggaagccctgttgtgaaggcccttcaaagatagcagttccaagacccaaggcaaatttgccacaagtgcaattgtctgctgtgttttcacgtttctgaatgttgccctattccccacatgcatcctgtgcatcctctgcctgtctccctagtttgttttgaggcagaaaggcaataaccttccttagaacttttgttttctggttggtaatggccatgttataagcagacatgagctcagatagaataagtacatggggaggattttctatatttcttctgaatcattttctgcgcagtcctagcatagtatttgtcaggaaaaagtagcatagatcagaagggtgacatctcccagcctttgcgtgcaccgtgctgaaacctccagtgttataacattagctgtcactctgctgagaggttacctcctgatccggacaaaggcaacactagtttgcctgcattctgtttggacttgcaggataatgtcagtcatgcattcgcagcagcagcataaatcaagccctaagatgatttaaagaatagaattgaagcctctctttcacaatcaccataatctaaaggaaatgggggcaatggcgttgctctctgatatttgggaggcagagcaagaattctatttttggccaaggaaatacctcttctttacttgccttgtttctgtaacacatgtagaccgttgcagtattcctgtccttctagattcaactttttactggctatttctgatttaagatcctatctaaatccttgacattgatgtgtcctgatttaaatggacatcttctgccgtttgagtgagaggcacaatagagtttggtctttgggcaccagtgttaaaggctgaagggattcactagctccatcacctgggccgagttacttactagtgctccccaaacctgtatatctctctggaattattaatattaattaaaagattaatatatcttaagcacccaagctaaaaaactcaaaatcctccttcatcgctcctcgtcctttacttttctatctagctgcctgcaaagtccttctgataaatctctcaaactgttttgctatcccctctgatatcactgaagcatttactatccctaaaatgtggtaatcccatagccccaatttttctctccatttttgctcttcacagatcccaaggtcttaaagtttgtgcttctcaaactttagcatgctcaagaatcccgtggcgggcttgctcaaatgcagattcccgggccccacctccatagattctgatgtggtgtgtctgggctggggcctgagagtctgcatttctaagaggattccagtagatgatggtccgtggtagccctaacctacaggatcacatcaaatttttggcacatttttcagcatcctttatattgagtctccatctaactttccagatgactctgcttttttttgtgtgtgtgtattttctcagggttcatttttttctttctcattagacaattttcccagactcctcagcatgccacattctttcatacctctttgcttttgcttgtagtactttggagaggtaatacagcgtggggatgaagagcaagtggcaagcctgtgactactaaaattcagttcaggaattaatcagcacattatggcctctctacttaggggctatgtgatcttgagcaagtgattttgttttgtgtacctcgattttgtcatctgaagaaaaatggggcagataatagtaggggccactgtatagattcttgtgatgattaaacggcttaatgcatcccacgggtcttgaacagccatatagcatgtgttaaatctctttgttgttctctttacacttattacattacctgttgctccagtcccttttgtgtatgtgtgtgtgtgtgtgtgtgtgtggtgaaattctcgttttccgaaaaaagccagatcttactttttttttttttcttctctgtagctttctctgacatttatcttcctttagtcccaggaccaattgattaatccttcctgcctgttagccatgacttgtagttttttgcttacatattttttgcaggtagagcctgaaattattgagtcttggaaactcattacccccattcctccttcttagctcacttttcatttgttaagttttaaatatatgccatccatgtgcctgaccccgtgcttgcgaagggttcgtttgggtgatggagtgctgtgtggggagtggattggatataaattcagtcatctgaatcagaaatcttaaattctgtgctctcagaagtgtacccccaatcagtgtgattctttcacttccttatcttacattaggagtaatttgacatttttattacttctggatttctccccaaatatgttgatagtaactttggcttgatctttggtcattatcttaatatcttacatttggttaggatttacagtttgcaaagaattgtcacataaatgaataccatttgcttttaaagcatctttctgagatgggaatggaaagtattcactttccttgattattatgcaaaatgctggacagagtgaccctctcaaagtcctgtggctaataagatgtggggaccatagaatgggccttgatgtccttggagactttgaaagaggagtcttaggaaagcctggaagacagggggcagactgcatgttacttgaggaaagtgtggaaagggagaaatttcattccgggtatggttctcctttcttttggtagtgtggccatgaggaagagaaaaaagagggaagtcaggttttgagaggctgggcaatctctcaaacgagatgtaactatattctcttgaaagcacgtaaatattcatcttcacattttactggtttgtattgatactagttttctttgtcatatataaaatatctaggtaaatacactagtatagcaatggaaaagctttccttttacccttgcagggttctgttattggggcctataaatttaatgcacaaaagacattaacaggaaaacaaggcaaacaaagcttatttgatgataataatttcacatgcacagggacttcacagaaaagaaataaaaactcaaagaagtggttagacctagaagtttatataccattttaatgaagggcaatacattgtggagaggagaatagacaaagaaaagggggttttgggctccgggcagtaaattgtgggaaagtgacctagaaatgtatggtagataaggcttgtttactaaggcttgttatgcggataatatgagttatttttctcttcctggtatggaagaagggaacctttttacaaatggaaacttacattgcctttacaaaggggaaatttatgtctgcttttaagcagaaatggggaaggcagagagttcttcctgcatctactgcttctcaattgctctcagctcaaaataatccttatgccaaagtagcatattttgggatggcatattctgatactcttaactagggaatctgtaccatacataacctgatcacatattatgagagttgattagtgctcagtgctagagtgagagaatgacgggaagaaggagattactggacatgagctgagagcagtgttctcagtgtggaaggtgaaatgagcaggtgcctccatgtcacttaagttgtataaaataggagaaataagcacagttgattagattgccttatgtcttcctgggatatcatctgatcgacaactctaaaacttttcctcaccaacaaaaacaccctggttcaaaatttttattacagttgtctgtttggaaatttaatttgaagaaatatcattgaaatatgttgaagaaagttagtgttttatgactattacttctttctaataaacagcttttcttttattataaaagtaacatttttattttttattgtggtaaaaaaatcacaccatacacacacacacaaaacataaaatttaccactgagagctatgatcacatcattgcagcccagcctgggtgacagagtgagaccctgtctctaagaataaataaataaataatttaaaaattaaaaatttaccatgaaagcctttttttttttttttttttttttgatggagtctcattctgtcacccaggctggagtgcagtggtgcgatcttggctcactgcaacctctgcctcctgggttcaagcaattctttctcctgcctcagcctcccgagtagttgggattacaggcacacaccaccatgccaggctaatttttgtatttttagtagagatggggtttcaccacattggccaggctggtctcaaactcctgacctcaagtgatccactcacctgggcctcccaaagtgctgggattactgagcttcagtattcacaatttagttggttagactcttgctactcaaagtgtggtttatggaccctgcagcctcagatcacctgagacgttgttggaaatgcaactggtgagccaccgcgcccagcgtgagagctatttttgagtgtatagttaagtagtgttaagtatattcacattgttgtgcaacagatctccggaactttttcatcttaccaaactaaaactccatactcatgaaataacaacttctcatttccccctccctcagcccccggcaaccaccagtctactttcggtttttatgaatttgactgtagaaataacctttttgcaggataagacttttttttttttttgcaagaaatccctaaaggtggatattataagcataaataatttaaaagtgtgaaacatttgactctgtgtctctagaggcctaaggatctcaatatgcctacttatagggactcttgtaaagaaaatcaatgtaattattaattgattccccccattccacaaccatcattctaatttccttctctatgaattcgagtactctgagaacctcatacaaatggaatcataggatatttatcctgttgtgtctgccttatttctcttagcatgctttacctcttaaagccgatttttaattttattattattattttcactctgagttgttgaactgaaggttggcaggatggtatcatcctcagtctcttggtctcttgagttggataactacatatatgaacccatgattttataactgtttatccattggaaaggccccttgaacctaacagatgcctgacagtttctgttttgtaattaaagttgtttactttgctctctttgggtggttgttcacttaggggaacattttctctgtagattatatgagccgtggagtttgggtgctctcacagtaagtggtgtgtgtttccatgatggacttctttcatctgctccagtgtttgggtaacttgtttatgtgtctgtctccccagatcgtttggcatctccttgggaaaagaggctgtggattacaactgttggggctcacgtgaactccttaaaaggcagagcaagcttttattcttttctgtgcctttgagcactaagattggccatgctcagtaaagggaattgaagtttagagaatgtgaaatgggcgacatacacaggttggtctaggggccctttcaagttctcccaataacccaaggaagtagctgtcattttcctcattgtacaatgtagacaactgagggtcagaaggaataatggacaaggttcccaaaatttgtcatttggggactacattgcaggactttttgtttttaaagcccatgttctttcttcatactttaaatttctgttcttggcatcagaaactgagtagattctctctccaagtatttggaaaggaaatataaaatttaattttttcatcatactgaatattgcttctttcagatcatctccctacatgtagaaccagaaatgaagacattggaatctctaggcacttggggttcaatctcctttgaaattctcagggatattgtttgttttacacaatattccctttgaacttggattcactttgggactttaagtaacgtataggattccctaacctaacacagttgtcccattatgataggaaattgttttcactcctcaaatgaaagtgatagttactaaactgttcaatgtgtaggatgaacccttgcaaacacttttttaaaagtttctttgccttggctcagtgtctaatgagggaagtgagaaaccatcagcgcaggtctgtggagagcttgcgggtcaggtcattcctgctgcttgtgaacaatccagaccttgcctgggtggggcaagcatggcgagcccagcaggaacagcttggggtggttatggctgttaattttttaatttagttctggaccctacaacccatcgatatctgttcatctcattattccctccctgggtggcaggaatggatataaaaccactgtggtagtttccccctcctccattttattattacttttgtacctttttatgccttgctaggttatgagctctcttactgctctgagttaaaggcagcacataaataattatgtgtaaataaaatgaaagcttacattgtttaacatatgcttagccctttcagaggaaaaaaatatatatatatgtatgtaatctaaactttccaacatatttcttaactgttgtatctgttttcgaaaaataatctcagtaaattttctttttaaattttaatttccttaactttgtgtgggtacatagtaggtgtatatatttatggggtacatgagatgttctgatacagtcatgcaatgtgaaataaatacatcatgaagaagggggtatccatccgtccaacatttatcttttgaatctcagtaaattttaaagcaattccgttcagtatggtagacatcagccacatttactatttaagtttacatttacttaaattgaatacaatgaaaattctccatctctgtagcctagtggttttcaaccagaggtgattttgtcctcaaggggatatctggcaatgtcgagagacatttttagttgtcactaccagggaagaggtgctactggtatctagtgggggcggtcagggatgcagctcaacacgctgcgtggtagtgttaccatgcacagaacagccaccatcgcaaggaaccatcggcccaatatgtcaacagtggcgagagtgagaaactgcactagtcacatttcacgtgctgagtgtcctaggtagctagaaactgcaatattggacagcaccaacttagagtattccccactgtcactgctgacatttggttctatcaggcagtgtggtctcaggcgagagggaaaagttaaggaggactgggagcagggaagtgatattctcatgaaaatacatttctttgaatgagacaccacagattctagatttctttgccatagacaggctctgtcttaagtttctgaggttatgattgtcactgaagtcatattattagcaacagtactcagctgtttgtggagtactccatgatcgacaaatggtttgtcataaattgtctcatttaattttgtaacactgtaaaacagagaagctctctgtttattacaggtgagaaaagtgaagtgatttatttgtctgttataacaatgtgtaggatgaacccttgcaataaaaaatgaatatatttaaaaaagaaaactggctagaccatgaccgtgttacatgggtggagtccaggtctttatgtgacagttagggatccttacaaattcacaaatcatatttttatggggacatctcattaaagaaaagcagaacttcactcccttcccctcacacttcaacaggacttattgacagatgatgtgcccttttttgacatgtatcaagtcattttatttttcatatttgggaagaccattttactctgattagcttatacaaataaagataacataatgcatgtgtcttagttttcctttagcttccactttaaaaagaaaactcagggatgtgcttaagtagttgcacattagttatgttatcttggccaaatgaggtaatttggagagaaaatcaaagtatataatattaaatgagacatataggaacccaatactaaaatttagttttttgctggccctacaaataaaggtggctagttggccatttgggttagataaaagagaaacagtcaaaatgacattttgcttacagaagtaaaaaatatatgatacaccggataaagaaaatgtacatgtatatcatagaatactatgcagccataaaaatgaaaaaatcatgtcctttgcagggacatgaatggagctggaagccattatcctcagtaaactaatgcaggaacagaaaaccaaacacctcatattctcagtcataagtgggagctgaacgatgagaacacatggacacagggaagggaataacacacactggggcctgtcggggggtggggtggggggagggagagcatccaaacaaatagctaatgcatgctgggcttaatacctaggtgatgggtcgatacgttcagcaaatcaccatggtacacatttacctatgtaacaaacctgcacatcctgcacatgtaccctggaacttagaataaaaataaaaactaaaaaaaaaaaagaaatataaattaaggcacccagagagagacccctcttaacaatttctacactggattgttgagatagtagcattaagctttagagacgcatgaaatggtcttcttatatttaaatatcttaatgattgcattgtatcagtggttaagacccaccgcttttttcagctccacttgcaatagaggctgctgttgtcattatttcctgaggctttattatgcatctgggtggactgtctttgcacactgccacggagggaatgatttctgatgaaatggtttccatgcctttcttagagtaaaggatttgaggaaatcctttgagatgctgcctttctctgctgagcgtggcaggcagcatatgatcagtttatgtattaccatatgttttggcctaaaaatgatgcctatggaaatgtggaatacattatgttacaaaatactttggagtctctttttctctttctcttcctaatgtttgaaaggaaatttgtgctagttgagaggtgccaaattcacagctttgggattttgcaaagttcatttcttgtataggatgtacaggagcccagacgaactagaccctatttctggatttccttcactggctcacataatgcattttcgatcatatttgggaaaaatgactcttccaccaaaagtgggctgtggaaatgaggatttgctgttacattacatgaggttgattgtgtggaaagaagacagggcagaaggcagggcagagaagacctggttaggaggtaaaatatatatttatatattacagtttgcttgagaaaatccatttggagcttctctgtggttcctggggtcccccacattttaggggtgagtcaggaagttacatgtgtgaattacgaatttcacatgaatgggacatgtgcattttcttatgaagtcttcagttccatgcttatcattttaaccttctgtttccctaagatcttaaagcaagcgtgtccaacccatggcccttgggccgcatgaggcccaggacggctttgaatgcggcccaacacaaatttgtaaactttcttaaaacattgtgagtttttttgcaattttttttaagctcatcagctatgattagtgttagtctattttatgtgtggccaaagacaattcttcttcttccagtgtggcccgggaaagccaaaagattggacatccctgccttaaagagacgataaagcaatcacatcactcaacgggtaacatttgttattttaaggagtgattcttattctgtttgtgaaacttgttgattttataagtctgacgtcactggatcacagaatcgctaacataaacagcaaaacagactaagtaggcatttttttacccatttctaaaaaacatgaatttatcaagcatagttttttggggaaaagttagttgagactttgaggaagtgctttctgcactctttatagcagatttgtatgttgattctgcgtcttatctttctatcacataaaagtgaaaggagtcccagattatttctatgtcaaaaagaaaaaaaataatccagctaatgagtttctcattgtaaagaaagaagccaaaaggttgttacacttggtttataaggcccttcttgggagctggggaagtttcctttactagtgccatttgcaacatgatgacagagtgagtgtttgacaccttgggtagagagagacagtaaagcaaatctgggataaagagcttagtgtgggtggtaaattacttcttgctgaagtcgccctgcctgtaaaggtgtgaagacaatacagcctccttcactgtctctgtcccttctctgttgttcctgttctctaagcatctgtacctatggtggttcgatcccactcacatgttaactacaactcaacctggaaaatgaatcaagcattgtctctgttctaatgaggggatacttacctaacgtgaccacttaaaaatatgagttgagttaacgtttcgaggcataacaggatgcacaattcatttctcaaaactctcaaaatccagaccagtgagcacagatagaaatcaggagctgtgtgtgctgcaggggagttcttcagaactgcactgctgcccatgtcatgctaaatctagaaggctgacgtcccaccaggctgttctggctctcttgttcaagccagggtacatttttttgagggcatttggaaaaactctccagttctgtctgactgagtccttccttttccataaaggttgtagttggggcgagcagacactggtaaacctgccaagttccatagttctggatgctttggaagcagcgtcatgttgcataaaattgcttgtaagtctgtggaaaagaacaacaaaagcgtcattctagatgacatcagtaagcaaagaaaatagctaaattttagtatggcctgccaatttaaaagctacattaaattagttgtttgccgtgcatggaacattcagtgctgtttaccaaaataatgccaaaaggtaaatttatggtgacacattaacaatgttaaaatacaggtttcatcttaatatcctgttatatcaccttcatatgtttatatttaaaaacatctgatataacaaatgatttcaatgtaaaacttagttgtctttttttacagttctcttttatactatgatgtgcggacataaagttgaaagtacattgatgatgcccaatattagatggcatttatttagttatatgctccttggataaagttttaatttccttattgcttttgttattttcctgggttttattttctctggagaaattaagaaaatgctttcttaattgttaatgctttctttcactcttgttttttgctccctgaaacaatacaagtaacagttatggtctcctgccctgttagatcagacatcctctaattgatgagatttcctgttacaatcaggatatcactagtgttcaggtcgaacaccctagttgataaattaacagattcgtgagtcccttcattggtcagtgaggagcagagtgcggagggtgtctctttctcagtacctcatccaggagacaggagataagcctccctgctctcctatcccaggggctctctcaaatgcagtggagcttgttagcaatgaaagactcatatgctgggaaccagtgcacccctggccactgacagagataataacactgacctccggtcacttgacaaggaaactctcttgtgtggttcgacttcccactgcttcaagccaattcagggggaactggacaggcagattagggatttctatgcacagttctctgcattaccagcagggtgtcctcagcatcagaccatggaggcagttcacatgcaggggccactgaaggcctgatgctccctgccataaaggtgggtttgcaagctcccattgcatgcagagtgggctccagtgttaactcaatctgacctcagaggagtggtgtggtgtaaacatgactggggtgtgtttgtgtctgtgtgtgtgtgtgtgtgtgtgtgtatgtgcatgtgtgtatatgtaaagccagtcatcagtctactactgtgatttcttccaggaagagattttttaatgaaatttaagaaaattgggaaggaggtagtttggggacatgttggtcaaatgatacaaaatttcagttaggaggagtaaggtcaagaaatctattgtacaacatggtggctatagttaataatgtattgtattccggaaaatcactgaaagagtagatcttgagtgttctcaccacaaaaaaattaatatgtgaagtaatgcatacgttaactaccttaactattccacaatgtgtacatattttaaagcatgttctgcacaataattatatatagtttttatttgccaattaaataataatttttttgaaagttaaaaaagaaagcaaattaattcctgtcgttggaattttttcacttatggtcttgtatacttgtatactggtcttatatatatactatactattgtatactatgtatatggtacatatatatactatacagcatatactatatatatagtatatatataatgtatacaagaccatatatatatatatatactcatacacataatatgcagcattatcatgtaaattatgtatagatgttgttttatttgacaaaagattgcaaggtactactcatacagatatagaccgtgccttcatggagcagaattagtacactaaacacagaaggtcttaagaaagtaaggaagtcagtgtttgctcagttaatacacatggtattacatgattttgagaaaatagggtactatgctaagaaagataggagatatgaattattgcaaaagttctctgaggatatgaacttctgaagagtcgggttttctagttaaagagaagagcacgtacaatggcactgaggtggaaaattatttggtacctatagagaagtttaagaagctgctgtatcatgacaggacacctggcgacagggccttagaggatcaagtcttttatattctgtataaagtgcagtgatggaagccagagaggctgtaaggaggggaatgatttgacacaagatattttggggaatgatgaagaaggctgagaatggaaagcgggagtctggttccaaaacaaacacactaatttagacagaagaggtgggtagctcactcaggtgaggctgcagtgaaggcagggtgaggcggatggatttcgggagatgggaggcaaaattggccagggttggatacaagaagcgagggagatggaaacatccgttctgatgccagtttcttaggaaagtggggagaaaggccagttacttaggtgaaggcgactggaagaggagcagccgggcttttccttgtgtgaaaaagggaagccctgttaaaattcattttgggcataataagtttaagcctgtgagattatatcaaggggagctactaaacaggcaggtggacatctgaagtctctggcccagaaacagtcaggactagagatgtaaatttgagttgtccagaatttcatggtatttatggccatctaggaaaattcttgggtaagttcaatatttctgtgtgttgctgggattcttccagggtttggccctaggagtatttgtagttgcttccctcaatggtaattaaacaagcgtggttggagagatgaggactggcattttctgaaatgttggcctcggtgagaaggcgacatgatggatgttaggtggtacagccaattggaatcagaggctgaggaatgagccaacgccaattccaatcccaactctcggctgcatccatcaccattatctccctgcccttttcttctccaaaataatgattagaaaaataaaactttaccttgcaggtccatgaggcttcaaaaacaaaaggaaatcatgatttctgtaaatgttctggtacatcttaggcactatgctgatagatactttataaactcagggaaagaaggaaatgatgagcccagattctgatgatggggaaccactcctgaattttttttttttttactccacagatttacagacagaacgagcatacttttaatagaattaatcacatagttccaacacattttgtgggggagggttagaatttatgaataaaaaagatagtaaatgttttctctacttttctctcatcgtttatctattgggcaagctaccttcatgtcagctgtacttggatgaaagttacttaagagtatatgcaaactggtgtgtttaccctatccaaatgatggtaagataattaaagcaatcggttctgtgtgtctgtttttcagaaaacttctatataggattctaaattgtgctttctttctgatctaccacatcatctcaacccatccaccttctttgaaggactgttaatctcaacacagcctttgtaattaagtgataaattcttacaggtatcatcgttagttaaatattatgcatgagattacctatattatgatgtacatacataatagtacacattattaatcatgtatataagaatattaagcaatctgagatttagaaaataataggctatttttttttttagcagttttgggcctgataaggcattccatttcagaccctgtgaggtctattggatgctgaatatcatcagccatatgatgatttggagtggaaaatgaagagttcccatgccctcccttcctcctccctggtatttcccctactgttatcttgcattagtgtgatacatttgttacaactgatggattactatcgatacattactattaactataatccatagtttacattggggtttactcttgctgttgtatatgctgtggtgtttgacaaatgcataaagtcatgcatccacctttacattatcttataccatgatttcctagtcctagaaataccctgtgctgtgcctggtcatccttctcccattccacacccctggtcttcttgttgtcttcataagagacgatattttccctttctcttttggctatttccgcttagccacaatgaaaggacttgctgtgacgctttgagggaggaaggcaccaccaagtgtcccttcaacttcccacacacagagccagacatctccaattactgagagacagctttgccttctctgacctcctgggcaaaaggccgtcaggcggcagagagcagctgcagataagcaaggaggaagttaaaaaggagagtgactcagaactcctaccaggctctggagacttgatcgttttgatactgtgactcccctttctcatcccaaaccttttgactcaaagtcgatcagtcaaacgatgtgtttgtggctagaacagtggaaggttaatggctcccacaggttgatttgcctctcttgggtcagtggtattctggaagctggcaccctgcacctttgttgataatcccaattctggtactatagacgtggaggttttcattgctattgttttaacttagtagaccttatgtgtgcctcaattcacaattgtaaaaatgtggaatcaacccaaatgatcatcagtcaatgagtggataaagaaattgtgatatatatatggtatatataatatagtattccatcatatatatatatggtattccatcatatatatatatatatatggactatcatatatatatgatggaataccatatatatatatggactatcatatatgtatatgatggaataccatatatatatatgtatgtgtgtgtatatatatatatatatatatatatatatatatatatgatggaatactattcagccataaaaaggaatgaattaatggcatttgcagcaacctggatgagattagaaactattattctaagtgaagtaactcaggaatggaaaactaaacatcatatattctcactcctaagtgggagctaagctatgaggatgcaaaagcataataatgacataatggactttgtggattcggggaaagggtgagaagggggtgagggataaaaggctacaaattgggttcagtgtatactgctcgggtgatgggtgcaccaaaatctcacaaatcaccactaaagaacttactcatgtaaccaaataccacctgttccccaataacctatggaaataaaaaaaaaatttaaaaataccttaaatacgcctgacacttgacactcgtcagcattttgcagtcactcagacctcattgcacttctacaaaatagttattcctcttttctcattatgcatatggggaaggcaagagtgacaagattctaatccagtccatctggctctacaattcatgctctcagctcccccactctcctaatcctccacagccatactcttacccttctcggccaggcaggatttgggagaatgtcttctaaaaacacactactcctttctggtattgggccactaaatcccttaccttactctaccttaccttactccttctaagaagcaacccccatacggctgatgatattttatctccagtagacctcacagggtctgaaatgaacaaagggtgtgtgacccacattacagtcaacacttcgtctcttgcccactgtgcaagccccggcccacagtggttttcattctctggaactctgcttttctatttaaaatgtggagtgatttgatgagatggtttcctctgtttttgtctaaaattaaggatgaagttctaaaacttgaatgaagctcgcacagtggtgcacacctttaattccgggtactctggaggctgaagcaggagggttgcttaagcccaggagtttgagtccatgctggccaacatagcaaggctctgtctcaagaaaacaaccaactccccacccccatccccccgcaaaaaacaaacaaacaaacaaacaaaagctttatggaaattagagaagagtttcatttgtccagtacgggaaggcttgaatatccagtcaaaccaatgtaaactcaattcctccactttttagacttgaatgttgtggtgctagaattttaaggagaaatttcagcagctctgagcacctgatgggacagccttgggtgaaagcatcaggaggacagagtttataatttctaacacctatggagttctatactattcagcccaagccatgggtaatggctggcctaaaaatgaaactttttcatagtcaaattagcctagagcagggtatattttctccctggctattcctactgctgatacttggtgtatttgtttggggcagtttcccctcatggggtgatgttgtctgggcccccctcaacctcatcctggggcatacaaggtgaagtgagttgtgtgagagtcaaaatttccagttatgaagaagcctggagacgaggaggaaatgcaaagttgaaggggacttatcagcgccgatgtcaatgtccacattttggatggacgccacagtttcatttagtacaaaaacagtctgtccatttttgcttcttgggcatgtggggaatgtggagcatttttcctctgaaggtcatccctgtgtctgagataccatttcatgactttggggatatatcaatttagctttttcagtgttcattgtaaccaactaagaagatgcttcaacacattgaaagttacaacgggaaaacttacaatgttgcagattttatgactccattgtgtgtgtatatgtatttattttctctcaggctccaggaaccttatttcattttttattatgacatttatgatatagggaaaataatctaatactggttggggagttgttgaattgataatagtgaaaatgtaaacattcttaacctctttctatttcctttattttccctataaccgtgttattctttagaatttgttaaatacaacaaaggggactcttcatactggtaaatatacatcaaagattatataataaggttaaaatttgggatttttttcttttcttttattagtatcatatttgtttttagagacaggttgttgctctgtcacctgggctagagtccagtggcgtgattgtagctcactgcagccttgaactcctggcctcaagcgatcctcctgcctcagccttgggactacaggtgcataccaccatgtccagctaattaattttttttttctttgaagagacaagatcttgctatgtctcccaggctggtcttgaacccctggggtcaagcaatcctcctgcctcagcctcccaaagctcaagcatcataggtgttggccaccaagtctggtctttctcttccctttctttttaaaaaatggggcatggaggacttggagtaaagaaatgccaacgttttaaatgttaaagaatatcatccaaagtaatttgctttgctaaaataatcatggtggatattgccaccattatctcttaagttattgaaggtcaacttaactgattgttttattttccaatactagtaacttatataaaaggagaatttaaaaaatgtttaagtgaattgggtccccaacatctcagcacctgcaatatttacatccatactgagtagtcttaataatgaaatattttgatgttttagagttcaacaattgtctttatgagcatgagaaaagcagtacacacccattcaaaatacgtaaagaatggaaatagttggagggaaaaaatgttacccatatatctaccacctagctattagcattggacagtattaccttccactatttttttccaagattagaaaagtcttttgtattaacaagaccttttgactagtgattgagttagggagtgcaatatctcacctctgaagtacaactctgtgacagatcagcctgggcactgccaggcacttctttctttatgcagttagtaatttactttctgttttaaggcagagctttatcttcttatttgtgtgttgtcactatggactcatgggttctgaagtattgaaatgggttggaatccattcccaccattatttgttttgatatccagtttgtcaaggtttgacttgtggggaattttgaagcacactgctgcgtccgttggatgagtgcctgtcattctgggagcacgtcccgcctttgcagcatgacgggatgcttcaggcttgtcttgtcgttctcttgctcatgcctgagatcaactctatctcagaggggtcctggggacgctttgttcatcattttgtgtgcctgcttatacagtgttcacaagagagccctgggggagacgatatgcataaaaacatctgcttatgcggacctgtgaaattgtgccccaaaagccataatcactgagttcttcaaaaagagaaatggtgctagagaaagaatgcagaagagcctgtgatggaggcagagacaccaccgtggctgctcttctttcttgccctctgtgcctgttgagattttaccaggaggagaaacctatctgcagagaccgtggggtacccttgtgtcagcaggctctcctcttaacttacaccttatttggttttagccttgcaaatcaagttcatcaagggagggtgaatttgtttatggaaaaggctcaactgaaagggtaaaggggtgtgtgtgtatgtgtgtgtgtgcatgcacgcatacatttattttgtagtggctggaatttctgtattgctgttccagaggctacaaagtaccatattaaaaaaaaaaatccctggccgggggcggtggctcacacctgtaatcccagcactttgggaggccaaggtgggcggatcacgaggtcaggagattgagaccatcctggctaacatggtgaaaccccgtctctactaaaaaaatacaaaaaaattagccgggcgtggtggcgcactcctgtagtcccagctactcgggaggctgaggcaggagaatggcgtgaacccgggaggcagagcttgcagtgagccaagatcgcgccactgcactccggcctgggcgacagagtgagactccatctcagaaaacaaacaaacaaagtttattttatgttctgggatacatgtgcaggacgtgcagatttgttacgtaggtaaacatgtgccatgatggtttgtcgcacctatcaacccatcacctatgcattagctatttatcctgatgttctcccttcccccacccctttgacaggccccagtgtgtgttcccctccctgtgtccatgtgttctcattgttcagctctcacttataagtgagaacatgcagggtttggttttctgctcctgtgttagtttgctgaggctcccagctccacccacgtccctgcaaaggacatgatctctttttatggctacatagtattctatggtgcatatgtactacattttctttatccagtttatcattgatgggcattggattgattccatgtaatgtaataattttattagaaaaggtggatcctgggattagtggttgattggtggaaggaaagggaaggtatggaaagtccttgggcaggcatagttacctcttcacagtacttcatggatcacattcagagggagttagtaggaaacacaagatagaaattcaggccatgatgtcagcaagctttgttctgggcaggctccagttggatctattggttccaactgatttcagccagttttgttatcttacaagcatagggagtttcagcatttcagcaggttgtttcttttcttatctaccatcctgcaaactcaagaatttctgttagtcattggtttctttaactcctcggggcacagtttcaataggagtcagcaaactactgcctgcagcccaaatctgccctgctacctatttttgtatggctcatgagctaagaatgggttttgcatttttaaatgatgaaaaaaaaatccaaagaaacagaatgttttttgacacatgaaaattatatgcaatttaaatttccgtatctcttatcagtttgctcaggctgctgtgataaagtatcacaaacagctttgcttaaacaacagaaatttattgtctcacaattttggagactggaagtgtgaaccaaggtgtcagtggggttggttccttctgagagggctatgagggagggatgagttccaggcttctctccttggcttgtagatgttcttcctatgtctccacatctttattttattttattttattttatttatttatttattttgagacagagtttcactctttttgcccaggctagcacgatcttggctcatcgcaacctccgcctcccgggttcaagcgattctcctgcctcaccctcctgaggagctgaaattacaggtgcctgccaccatgcctggctaatttttgtatttttttagtagagacggggtttcaccatgttggccagactgatctcgaactcctgacctcagatgatccgcctgcctcggcctcccaaagtgctgggattacaggcgtgagccacggcacctggccttctccacatctttttccctctatgtgtatctctgtctatgtacaaatttttccttgttataaggagaccagtcattgggtgagggcccaccctaaacacctcatcttaagcaattacatttgcaaagactctatttctaaataaggtcacattccagggtactgggggcccaacatatcaattttggggggaacacagtccaatctatgacagcatcccacatgaaatgttattggagcacagccacacttattcattttcttatggtctgtagctgattttgcactacaccggcagagtcaaataatttcagtggaaactgcatggcccgcgaagatgaaaaccaggacctgtggtgttatacgcagaacccggtgaaaaatgagaatgcaaggcccctttgaaaaattaagaatctgaagacagtgatggcaaagcattaaaccaaggttgggccccttctaaatgtggggccctgcgtgactgtaatttgctcacccttgaagccatccctgcctaaaatatccactatctggtcatttacagaagaaagcaaaaattgtgggtcctgcattaagagcagagctgggagtgagatcttgggcttcaggggcatcagcctgatgcaggactacagatgcctcaggcctgagtgtaatcaaaagataccaagaaacgaggttcatgtaatttaccaaggactagtgttggtttagttcctctttcttctttcatctttgttgagttttctgtgctcagcgtgtccttaatggtcattgcagcttgctccatttcattggagtgttttaaaccctctttcttgcagtttccccgagaggatgtgctcctgtttgatgtccgtcccttacagtatgttattgtagcacatgcactctggcagaagggctagttgaaacgcgatgctgttgtttttaagctcctagaagtaacagtgctaattgggattgtgatcaactgtgcttgcccaggaccatcagggggcaaggaccacatgggggtcatggggaaggtggttctttattacctttgttatggctgcaacccttctaggctagctatagtgtttggacttgtagtcaaatataatcctgcattaaaatcaaacaggcagtagcattccaaaaagtctactgttacgggctgtattctgtcttccctgcaaattcagatgttgaagtcctaacccccagttgctcagaatgtgactgtatttggagttagggtctttaaaggggtaattaaggtaaaatgaggtcattagggagggccctgatcctataggaccggttgtccttgtaagaagatgaggacacagacatgtacagagggatgacctggtgaggacacagggagaagacaacatctacaagcccaggagaggggcctcaggaggcaccaaccctgcccacaccttgatcttggactttcagccttcaggactgtgggagagtaaatgtctgttgtttataaactgcccggtctatggtattctgtgatagcagcctgaaatgaataagacatctcataagaagaggagatgaggacatagacacacacagagggtcgaccacatgaggacacagggagaagacagcatctacaagccaaggagagaggcttctggaggaaccagccctgcccacaccttgattttcaacttccagcctccaggggtgtgggaaaataaatagtctgttgtttaggctgcccagtctatgggactttattgtggcatttctagaaaactgacccatccacctagatcctcataatttctcacctggctgctctgtgtactgctgtaatgtgtagtgtgttacttaaaaatgtcttctactttgcactgctgtggttctcttgtcctcctgtttgctgttcagcttctaggcctgccccggcttgtagcactctctgggccattaaagttttatttattatgataaatatatatcaaagacatgctacttacaggatactctatacattctttagggcatgtatgcataggaagcatgaagcagagtttgtattctcaacaagattatatcatagttttgggttaaagtctatatgcatttctcttttttaaaaattttctttttaaaattatagacagggtctcactatgttgcccaggctggtctcgaactcctgggctcaagcaatcctcccaccttggcctcctagagggctgggatgacagatatgagcccccgtccctggccatatctcttggtcataaaatgaggtgggttttagagccagtctggcaagctggctgaccttgggcatgtcattaaagttcatggtgcaagcaaaggttagtattaataactcatcagggagaagtatgtgcaagggccaaacttgagtctgatgcctagtcaggagaaggcagaggaatggggagaacacaaacaaacctaagccagtctcccaaagacaatgtccacatgtccacctgagacctttttgtgtgtgtggaacaagaaacaagtttttgtgtgtatggaacaagacagcgttgcccagagagctgcctcggaagtcattatcagggatgggtttcatgttatatgcaggaaggtagccccttctcctctatgctggctcccctgtgttcagtgggtgtcaagctgatgtctgctcttgttcatgttttccatgatgttctagtgcatttctgcctacatctgcctgagaacttggccaaagtgtgaaagtgtccctcctccaacctgccatctactctcttttttgctttttgtttttgtttttctctaaaaacaagctgggcgcagtggctcatgcctataatcccagcactttgggagactgaggtgggtggatcacttgaggccaggagtttgaaaccagcctggccaacatggcaaaatcccatctctactaaaagtacaaaaatcagctgggtgtggtgacgcacacttgtagtcccagctactcgggaggctgaggcaggaaaatcacttgagcctgggaggtggaggttgcagtgagccaagattgcaccactgtactccagcctgggtgacagagtgagaccctgaaaaaagagaaaagaaagaaggaaggaaggaaggaaggaaggaaggaaggaaggaaggaaggaaggcaagcaagcaagcagggaggaaggaaggaaggaaggaaggaaggaaagagaaagaaagaaagaaaagcaagcaagcagggagggagagaaggaaggaaggaagagagcaagcaaggaaggagggagggagggaggaaaggaaggaagaaagaaagaaaaagaaagagagagagagagaaagagtctcactctgtcgctcaggctggagtgcagtggcacaattatagctcactgtagcttctacttcctggtcacattcaatcctcctgacttagcctccagagtagctgagactacaggcacacatcaccacaccctactaatatatacatagatgtgtattttttttttttttattgagacagagtctcattctcttgcccaggctggagtgcaatggcacgatcttggctcactgcaacctccgcctcccgggttcacgcgattctcctgcctcatcctcctgagtagctgggattacaggcacacaccaccacacccggataattttttgtgtatttttagtagagacagtgtttcactatgttggccagactggtctcaaactcctgacgtgatccgcccgcctcggcctcccaaagggctgggattacagacgtgagccaccgtgcctggcctccctgctaattttttatttctgtagagacaaagtctttctatgttgcccaagctggtcacaaactcctggcctcaagcaatcctcccacttcagcctcccaaagtgctgggattacaggtgtgagccactgtgcccagcctgccatccactcttgatcatgtttccacagcattctggtgcatgcctctttacctgcaaagtgagagcagaagaggtagtcctctaatctaggtggtgtaatctgagggcttgtgaagatattttccagcatatcttcatcaaggaggttgttccatggctacaattattccattcgaatttttgtgaccccctctaaggtgagactgctcctgagagcaagtattaaattcattcatacattcagtcccagaatgaattcatccatccaacagatagatattcattgaacaattcgtaagtatctttggcatggaggttaaaaaacagatgagtccaacctttaagcagtacatagtcttaggagggaaaacaagcaataaagaggaaattttaacagcttgaaaatgctataagtgaactggcagggaaaataggagaaggacccataaccctgggacaaattaaagctgacctctgaggaagagctagctaattggaagcgtgggaggtggaggggtttggccgtgtccaacagggaggttggacagcatgttacaagaaagcaagaggcaccagggcatatctgaggcattagaaatagctgagctcatgcagtagggcattaaccatgtcccttccatggtgcttgccaatacattgagcacccacagctctttctgctgcatctgccactctctatctgagaacttgctcatagtgtggaaacttccctattctgactgagaagcaggctagaggtactgggagttaatgccctcgggaactgccctcaagtgccaatagacaggaggtagtagatgagaaataccatggcttccctgtcacttgagaaggagaacagactcccagtggttcccagtgcaggtgacccccaggtactcagagcataaagcattaccttagtgtaccctggactcccttctgtcccctgcctcactccccttcttccttattctccatcttaggatcatgtaaaaccagactgtgccaacctctgaggttaagagcatagtcctggctgggtgcggtggctcatgcctgtaatcccagcactttgggaggctgaggcaggcggatcacaaggtcaggagatcaagaccagcctgaccaacatggtaaaaccccatctctactaaaaatacaaaaatctgtttggcgtggtggcacgtgcctgtaatcccagctactcaggaggctgaggcaggagagtcgcttgaacccgggaggcagaggttgcagtgagctggtatcgtgccactgcactccagcctgggcgacagagcaagactccgtaaaaaaaaaaaaaaaaaaaaaagcaagcacagtcctccaaattgccaagtatgttcaagatgtctgcccaaccacaagttcagcatttctcaaaaccaccctcaggtttcacaatttgctaaaaatacccccaggattcactgcaggctattatgctaaggctcacgtctattacagggatatgatctgaatctgaaccagccaaaagaggagttcacagggtagagtctaggggaattcccaatgcgaagcttccattgttttcaggatgcatttccacacatggtaggatgcacgaaatatcacccacgtgggaagtcacctgagctcaagtgtccagagtttttactgaggcttcatgccgtaggcatgattgatcgagccatgacccgtgtggttaaaatcaatctctgcctgcccccttcccacttctctggagattgggctcataccaattggcctggaggggctctaccaggtgcctcctaactagcaaaaactaacaggcatggtcctaggggcaccatgaataacaaagacacctaccactcaggacatcccaagtttagagattgcctcccaggggtagggacaacagatctctctttgagtgagatcagatttcttactgcacagactccctcagcatgtgtctggggaacctgaggtactggctcattgggggaacatatggtcatctgagggtgaacgccaagagcctcacatcgggagttgagcttttcaagtcatgtatggcgttgagaactgtgttccaaagagcctggactttgcagaacagggatccatgccatgcagaaaggtactggcttccatgggaagaaccaatttgtagagactcaggaggcagggagatgggtaagaagatatttgcaatgattgcaataacttcagtagaaaagcttagcaacttagacgaggatgaatgagtggctcagggcataaaggaaaatggaaagtctgccccaaaggatgagggcagtaaaggttccaagcagctggatggacagggtatggctgactcgtatcatgaaaggtaggtgccttaaatattgttgggcaagactcacaggtatgtttttgtccccatggtattgacaagaaaactgaggcagagaaaggctacacaatttgccaggctcctaggacatttcacaacaaggcattctaatgcatcagcctgtgcttttaactatcactgctggatcaaaggtagagaggcaacaggtttagccctgctttgatatgaggaaggattttctcccaatttgacacatttgcgggaatgcagaaagatgtcttatgaagtggagatgtgcaggtagtggctgggtcagatattgtaggcataaaaattggggcctctttcaattttctgattccttagctccattcctgatatttactggctgctacccttggcaaggcctaatgctcgtgtgtgtgataatggtgttgggtattgattctaggattcctggaatcaaagaaacaattccacagttctgcttactccactgatgttttgagggacttggactgaatgacataccatcagataaaattaccttctccagtttttcctagctggggaactttctatgagagatgagtttgctttgtaattgctagagcctttgctaattgtattagaagtgctttataagataacaaaataataatttgggggatctcagattatttccagaggtcagagttttgctgacaatttcagttcattttaataaacactgatgaacatcagctatgttctaggtccttgctgcactgtggggaggaggagataaattagaccaggggctggaaaattatttctctaaagggccagatgacaagtgtcttgggcttcctgggacagagttgtctctgttgcaaccactcagtgtgacgatgtagcatgattgtggtgatgtgtctcaagtgtccccaatcctagggcctcggacccctaatggtccatggcctgttaggaaccaggctacacagcaggaggtgagtgctgggtgagcaagcaaagcttattctgtatttacagctactcaccatggctcacatcaccacctgagctccgcctcctgtcagatcagtggcaacattaggttctcataggagtgcaaacaaaccctgttgtgaactgcacatgtgagggatctaggttgcaggctccttatgagaatctaatgcctgatgatctgtcactgtctcccatcacccccagatgggaccgtctagtttcaggaaaacaagctcagggctcacactgattctacatcatggtgagttttataattatttcattatatattacaatgtaataataatagaaataaagtgcacagtaaatgtaatgctcttgaatcatccagaaaccattctcctcctcctcacccagtccatggaaaaaaaaaatatattccacaaaaccagatcctggtgctaaaaaggttggggactgctaatgtagctgacatagcgtgaaagcagccatagataatctggcaatgaatgggcatggctacatcccattgaaacttcgtgtttggacactgatgtttgattttcatataattatcaggtgttacaaaatattattttttttcaaccatttgaaaattaaatatcaccatggggctgtacaaaagcaaatgtcagagtggattcatttcccaatgggcttagcttgccaaactttgaatgagacacccggcccctgattttaaggagctgatagactattctagagcagtgaacagatgagaaatcatgtcaacacaccgtactgagagccgtagtcatgggacagggaatcacagggtgggctcttcatgaactttgcttcttggagacgttaaaggctctttatgttaaattctttagaaagtgtactgcttctacacttggtgaataaaacggagatgaaagcaagaatcgaggtttgtaaaatctgtgcttgtaaaaagacttttgttttattttagttcccatggtggtgaatttttagcagtaggtcaaaaacatatttggttactgagataaatatctgtacaggtgaatggaatagagatagaccttcaagaaaaccacagctttctttttttcttttatggaattctattcctttggagcagagcacagattgtctttgctggggaacattcgtacttaattttattggttgctttttggttacacatgtggtttgtttatactgaagtattgtgccagaatcatctgccctcctgatacagacctatgggagacataagaccaaatttggcttcaagaaccaggggaacaggtttaacgaaggcagtgtcagctctagccctggggctggatggcttggagttgagagtaaagacagagaaggatctgaggctcaagctgatattcacagccatgaattttgtgtcttttaggatcagtgccaagggatttagctggctggagggctatagccatttcagttctggtcactactgaatccctcaaatgtggcatcatgcttgctactcaatacaatttaacatgaaaacaaagtcattggcttcttttctgcaaccccatgtcatgctgtctccttcttcactcatgcactggatatttattgaatacctactgtgtgctgaaagcttttatggactctggaccatagggtgaaaagacagacacataccatgcccacatgaaactcccttctagcgtgagacagacaaaaaacgcagtgagccaattcaagtactgtggttagtaaggagaaccagggagaaaaattgagccagataaggggaactagggtttgaggagggtgtttattttccgacaagtaaggtaaaaaggtcatgtgtatttgtacacttgagcagaaatctggaggaagtaaggcagagattgtaggtatgtggggaagtactttcaaggtggagcctacaggatctgctgaaggattgaaattgggaggagagaggtccaggatgactccaaggatggaggcaccacttcacttactggagtagataacaagaatccactatctggttactaggctctcagtccaggaacattcaatctaggagagcatccaagcaaaatgacagtgggttcatgtagacctgttccaatagctacaggttgagccctatttcttctttcaccccgagatgaccaaatctaaagcaactgcaatgaagaggtgagcagatgataaaagcaagaacaaaagaaacagatcttagtgtgagtgagtgtgagtataataatactgaattatactcagtattctaagtaagcatgatggctgggcacagtggctcatgcctataataccagcattttgggaggttgaggcgggtggatcacttgagaccaggagtttgagaccagcctgtccaacgtggtgaaactctgtctctactaaaaatacaaaaattagccgagtgtggtgctgcatgcctgtagtctcagctactcgggaggctgaggcaggaggattgcttgaacccgggagacagaggttgcagtgagcagagatcgtgcctctgctctacaacctgggtgacagagcaagactctgtctcaaaaataaaaataaataaataaataaatttaattaaataagtaagcacaaagactggtttggtccaggtggacagaggactggttatgctcatgcaatttgttggaccctgtagaattgatgatactgactttgctttggtgagatgctatccttgtgtgaggcatgccatgaagaagagctctatgaaactcctcaaccttgccatggtgaggatgcttgagtaccttctattgttagaacgtgatatttcttaacttcagaagaaaattatttttagattttgtattggggataattgttcttccaggttcctttcatgcttttaacttatgtgaatacttgcattgtaggaattgatcaagttcttcttttcctgttgggaattaggaagctgaaatccaaatttgtggcctacattcagtgggtgttgaggactcagtagagtgtagtttggtatcacactctttacagattccacttgatgtcctcattccctcttatttcttcttgctaacttccattttaggttattttgctatttcttatgaatatgtgtatcatgttgaatcattcctaaaaacaaaaatcagaaactaaatgtacatgggaggccaggtgcagtggctcacacctgtaatctcagcgctttgggagccagaggtgggaggatcgcctgaagccaggtgttagtgaccaacctgggcaacatagcaagaccctacctctacaaaaatctttcaaaaattagtgaggaaaaaaaattagccaggcatggtggtgcatgcttgtagtcccagctactcgggaggctgaggtggaggattgcttgagcccaggagatgtaggtgtcactgagctgtgattgtaccactacactgtagcctgggtgacaccgtgaggctctgtcaaaaaacagaaacaaaaccaaacaaaaaaccaagtaaataaaaaataaatgcacatcaggccagtgccaacgacttccttgttttctttacctgctgtctaaaatgaatgttccctgggagtacaccctagggagacaggaccccagatgtctttgatcactaattgtggctgaaactttaggaaagtaaatgaaatgtcagctaaactactaggcagacaggagtttattccacgtgggtaggaaggcggcaatgtgcctagttttgtacgagcaatttcccacttcaaaatgttttattattgagtgaccttgtggaagccagtggagagatctcaacttgggaaatcgtttcttgatttcacataattttaaattttaaatgaggtctatctctcagacaaactcctgttataaatcaggtaagactacgaaattgaagacacttggctacccattggtgagaacatagctttgaaaaaggatttctctttaattttccccaagtagtcttttttttcccccatcgatgaggtaacagttttgttactttgccaatatctagttaattttatttaacatttttctccccaattcttcaagaccttaacgtattcagttctcctttcagtgagtatgggagtattgaacagttctgggaggcgatttgcattggtgttaaggacgagggcatgggaaggccatctgcttttgatcagggtgtgttttgtggtttgggaggtaaagggccacagtggagccatctctgaggtcctagcatgggctaggctggagccctgctttctgtggcttggccgccctcagcggctccagagttcccagggtattaggggatcatacagggggctgtgtacccacacatgccattgcctcccaggcatcgctcccgtccggagacactgtgtgctttctttcaggtgtcagtgcagatcaaagccatccaaagaacatttgcatgagaatctgtagaatgattaattagcaatgggcattagtaatttttctttcaaggctttgaaatgtctttcattgataaactagttctgttgagccccgactccttttcaaaatgtttttcacccagtactccctctgtgactacaaattggattttgtttccccctgtctacacctctcctttgactttgattcagcagtgtggtcaaaaggacagcctcctgtgggcgataattcattctcatcagcccctgtatctttttttgaaatggagtctcactcactctgttgcctggactggagtgcagtggcgctatctcagctcactgccaccaccgtctcccgggctcaaaagattctcctgcctcagcttcctgagtagctgggattacagacgtccgccaccattcccagctcatttttgtatttctagtagagacgacgtttcaccatgttggtcaggctagtcttgaactcctgacttcaagtgatccgcccaccttggcctagcctgtttatctttttcagatgatattttatagtaggatatcttcaaccctctctttttttgctatcctcttgaaacgcctactgttgttctatttaacccatcttctagctctgatttctgaccatgctgttctcatttacaaatacatgtgatttgacatgttcagattctcctcctgattatccaagaaggcttcaggatctcctcagaaacagaaaatgggaaatgcaccagcagatgtgtttatcagcacattccaaagcaatggtttagcaaagctcagggacactgcagtgttctgcagttgcctggaaatgccaggagggacccaggagaactggaacctccagaaaaagttgcaagtctcaagaggattacactacttatgggtcccccaggaaactatcataagcagtagacacaagtaacactgggcaagtcattgtcaaatataaagcctgtcacttctacaggatttaggcatgtgagatgcaagcttatgtagtttaacaaaaagaaaataggttaattttgcaaattttataatttgcatgtgaacacatttcctgggtctcttccagtgccatggaaggggctcctacaagtgaggggccaccttgaacttgattggcttcctgggaaatccactgcaacccccagattggggctcagcaggctgttgcacccagaagatgtagctgagaagtggatgggacttgttggagcaccattttatgcaggcaaaatttgagatgattgttaccattgttgagaaattttaaattggggaacttggacatgttaagactcaggttgatgcaattttattgttgtattcgttcactgaatacctattgcttatgcaaagtgttcttggggatactgatatggacaaagacaaaagtcttgtcctcattgatataagaggataataaggcgtatggcaacaaataaagcagaggaggagatgggaatggtaatggtaggtcccacctctgtggaccatgttgataagatggctcattggtgaatccctggggatgatggtgggctggccatgatgagacatatcttcaagttctagctttgtcactatcaagatatattgccctagacatagtcacgtatgtcaactccctgggtcataaaatcctcagcagtaaaaatgggactcttctcgctcttacttggggttaataaaccctgacattttgttttccctcaatgcttccatccatacctgcctctcaccatcagagatgtagacaatagatttgactttataatttatgaaacatcttggaggtcaggaccggcccttttgtgaatactctgggcactaaaggaatttgggtatcgttcctgggggagctgtagacgagggtagtgaagcgtatgtctagtggattttcacttcttaacacctttctgtattggaaccattttaatggaggctgataaaggagatgctgcctggggagactgtccgtttattggtcctttatatcaaagaaaaggtgtctaagtggctattctctcttggattcaatttttctttactaaacacctagagtgcacctgatgctggtagtgttctttaacatcccacaggactaatctttgcatttactgaacaaagacatcaacggaattatagaaagatagaaagtatatatgtcaaaactggctatttaatagcatatgtggaccttttggagattcatgaaagcattgttaaaataatattgctatttgataataagtgtaatttctatgatattacttttatgaacaatagtccaaatataaagaattaaaaattaacacaaacaatttttaactcctcaacttagatacagcaatttttaaatgattgtcattattttagactagatttatggcaaatagttatttgagtgtttattgcatttttgtggcatttacttcatccagttaaatttgtttcctcagttacacaataatttccatgtaattgttcttttttttttttttttttgacggaattttgccttgtcccccaggctggagtacagtggcacgatttcagctgactgcaacctcggcctcccaggtttaagcaattttcctgcctcagcctcccaagtagctgggattacaagcacccaccaccatgcccggctaatttttgtacttttagtacagactgggtttcaccatgttggccaggcttgtctggaactcctgacttcaggtgatccacctgccttggcctcccaaagtgctgggattacaggcatgagcaactacgcctggccaattgttctattttaatatatcatattggttcactttggaggcatataaattgttttccactacgaagattagttcatcctggaagcattattttaattgttttgtctatcaatttataatatttgtacagtttatcaatttataacatttatacagtttataaatttataacatttatcaatttataacactatgccatttaataaactcactggatttcaaatgctttgtggagatgggaagttctgatgatattatttgtccctaatgagatgcccaagctgcatagagcatgtcagggtgttgaaatgagaaattattaaaaggtataggtttaagatgcttttttggctcaaacgattcattttctcctctgtcactcaccctaatgaagtcccaggtcttttcttaaggagattgaacatacgaagtgcacttgcttactgcttgtagctaagaggaaaaatgtctctaaaatagtttctaagctggcaatacactcaactcactcaaaagctaagagttcactttttttttacataaagattccagaattatcatagaaatatgcttcaaagcagtttggatttgtgggaattgtttgaaagctctcaagttattttcaagtgttagtgcgacttgctatatattttgcttgctcttttctatcatcctttgaattgcggtgacagtgaattgcttctctcctagcctacgtgagttagccctttcttagaatttccatctggactgtgtgattgggaaatcaatattgtggagatgagggttctgagtcataaccagaaagacttgttctgaatgcctttccctatggtggtgatggtttcgtgcttatttatttataagcatgtaccctatatcactggttctcaacccgggggcagttcttgtccctggggggcatttggcaatgttttgagacatttcgggctttcacacctgaggatggaagtgctactagcatcgaagttgctaatatcctccaatgcacagaactgccccccacaacaaaggcttatggataagccctgcatgtcagtagcgtggaggctgagacaccctgcctatacaagatgaatagtacatttctgcctttgatggtagaacaaagcgttctatgctcacgacaaattgtaccctagacaaggatcggaccctccacctcgatctcattggtagcatgcaagtgccctgtgaaatcttcttttttttttttttttttttgagacaggttcgcactctgtagcccagggtggagtgcagtggtgcaatgtcgactcactataacctccacctcctgggttcaagtaatcctcctgccttagcctcccaagtagctgggattacaggcgtgcaccaccacgccaagctaatttttgtatttttagtagaggtagggtttcatgatgttggccaagctcgtcttgaactcctgacctcaaagcaatccacccgctgcagcctcccaaagtgctggggttacagatgtgagccaccacgccggtccagaaatcttcttttgaaacaggattttattctcaagccttcccccttttggcagggaaggggattagcctttacttataattgtaatctacaaaatacatgaagctttctattgcagccatgaaaagatggaaaatgagtgttagcgttcacatttattttcatgctgagaaatacagtatcacttcaatgtagcaattctcaaaggactttaaaggcctagctatggtttccaaaatcactaggcccacaaaatcctactttatctgcctactacaggtggcggctactacaggtgatggcatgcctattacaggtgatggcacgcaccgatagtcccagctactcaggaagctgagatgggagaatcgcttgagcctggcgggtcaaggctgcagtgagctgaggtcgcgccactgaactccagcctgggtgacaggagtaaaaccatgtctcaaaaaaagatgtcttccttgactgtcctatgtttattgccttgttgctagactcaccatctttcctttcgctctttattattaacctaaaagaataaaattgtcccagcacggtggctcacgcctgtaatcccagcactttgggaggctgaggggggagggggtggatcacctgaggtcaggagttcaagaccagcctggccaacattgtgaaaccccatctctacaaaaatacaaaaattacccagacacagccaggagtggtggctcacgcctgtaatcccagcactttgggaggccgaggcgggcggatcacgaggtcaggagatcgagaccacgttgaaaccctgtctctactaaaaacacaaaaaaattagctgggcgcggtggcaggcgccttagtttgacaatatgaatctattcatattttcctatagtcccagttcctgagaaggctgaggtgggagaatcgcttgagcctgggaagttgaggctgcagtgaaccaagattgcaccactgaactccagcatgggcaacaggagtgaaaccctgtctcaaaacaaaactaaactaaactgaaactaaaaataaaaataaatggaaacaacagcaacaacaacaaagcttaaagagaacacattcagaagaagagtggagaaatatgaagaggggaagtaatagtaaaaacaaaagtccagacaggtaaatctactgctatgttagggtaggatatttgctgaaatcaggttgactgaaaggtgtgtgtgttttgagcctggggtctgaggggccacacgagaagtatttcttcagaaaggtgaagttgagaatctttgtcaattcacattctgccgacacctgcagaaagctctttggttcctctttctgctgagacatggccatttcccctcctgctggacaacaggatgcctggactcccttcgtcgatgttgcactcagctcctagcttcacctctgcctcagtgcttctccctggaggaactttgagctgcctattgaggggcatgtgtttgcagctgagttcttttacagtgaaagcattgcattttgaaattacacatgggaaacccatctaatataatgttaaggtttgtaaaccaataagtattggagacaggtctcaatcaatgtagaggtttattctgccaaagttaaggaccgtggcctatgatagggcctcagaaggtcctgagaacatgtgcccaaggtagctgggttgcagcttctcagtacattttagggaaaaagaagttacaagcaaagatgtaaatgaatacatggaagatatacattggttcagcctgaaagggcaggacatttcaaagcagagggcttccaggtcataggtgggttcaaagatttcctgattggcgattggttgaaagagttaagctctgcctgaaatgttgaagtcagcagaaagaaatgcttgagttaagataaggacagtggggttgaagaagccaaggttcttgtcatgtaggtgaagcctccaggtagcaggcttcagagagaatagatggtaaatacctcttattggaccttaaaaggtgtcagattctctggaaaagaactaataagggaaggcgattctctacagaatgcaaattttccccacaagagatggctttgcaaggctatctcagaatatgtcaaagaaatatattttgaggtaaaatacttttttttttttcagggcctgctatctgtcatgtgatgctatactacggtcaggttggagttgggtatcttattgctacaaagagtctgttttgtcagtcttaagatccctatgctaatgtgaatgctggtcagttgtgcctaaactccaaaggaaggaggcatgtctgtcccttctttcctgtcatggcttgaactaatttttcaggtttatttgggaccccttggctaagatggggtccattgagtggaggcttagaactttattactttatttttactttacaggctgaatggtcctctgcataacggtattttcgtcaagctaaatcttaaacacaagtatgtcgacgaaaagagtcaaactctgtagaatatttgaagagatttattctgagtcaaatatgagtgaccatggcccatgacgcagccctcagaaggtccttagaatatgtgtccaaggtggtcggggcacagcttggttttatacattttagggaggcatgagatatcaatcaaatacatttaagaaagacattggtttggttcagaaaggcggaacaactcaaagtggaggcggggttgggggggtggcacttctaggttataggtaaatttaaacattttctgatggacagttggctgagtttttgtctaaagacctgggatcaatggaaaggaaatgttcaggttaagataaaagattgaggagaccaaagttcttttgaagtctcacagtggctgctgttagaaacaatagatgacaaatgtttcctattcagaccctttaaaaggtggtagactggaaggaaaaggtctagctatgttaatagggattctttacagatgtgcatttttcctcacaaaggatggcttgcaggaccatttcaaaatgtaacaaaaaacatattttgggggtaaaatattttgattttcttccttgtctcgtaatgttatgccagagtcacgttgcaaaataagtcatgatatatagagttaaataaagcccatctaatgagaacttatggtttgtagggcatgactccctagaccccttagataggaatttggacaacatgaaagaatcagagcttagtcctcaagtagaatggaacaacagcataacacaaaatgaaagggcccaacttattaatgcaacacatgatttatactgaaaattttagtcaccagatctttaaatgatacattattttgttaaattgacatttaaaaagagtagatgattctgagttgcaaacacttctattttattcaataaagaccttctatatgcattattaggagttcactgagtgccaattctttcattgatatgtctctaagtttttaatttttcaagtggtcattttcctctaggtcatcaacacctagaaaaaaatgtgtttcaattgactcataaaccttaagttaatgtaattgctgtctaacagtttctagaattattgcttttgaatggttatgttgcatgaaaaattattattcaaaaactaacacgaaagaggaggcattgaaagttctttataaagttttccatttttatgtgttgatgatctattctcagacttcatgtaatttgaagtaattgctgctatatggctcatgactctcaaattcagcctgcatcaagatcacctggggtgcccatggatgcatttttctggctgcaacttcaaacctactcaatcctaatcttggtggagtgtgggagaggggaggaccaaacccacactttaagagataccgatccatgtgcttagtccattgaatggaatagacatgtttgacaatatgaatctattcaaaatgggatagttgaagatcactgaatttttaacttacaatctatttgacagggaaagtcagtacatttttaattattgttcaatataaattacatatatatactggtgaatttagaaactttttttttttgcctaataacattcttgaaatataattcacatgctgtacaatttacttgtttaaatagttcattggtttttcatgtatttatagtcttgcaattatcagcagaattatagaatatttttatcactacccccaaaaaaatcccatagccattggcagtcgcttccctttccctccaattccttcagtcctacatatccactaatctattttctttccctacatagattgactcattctagacatttcatataaatgatggaatcatacagcatgtaatctttttatctggctttttattttacttagcataatattataaaggcccattgatgctgtagcatgctttagtattccatttcttttcattgctaaacaatatttccatgtattcttttttcattttatttattcattcattcgtcagtaattatatatgaaatttgcttccactttttggctattatgaataatgctgtaaggagcatttgtgtacaagtcttaatggtatggatagaattataaatatgttgtatttattttattctgagattttatacataaaactttactaatttactctagaattacattacaatattaaaataaactctgtgtctcttcctttgcccctattgcaaacccctgacctaataaaataaaatcccagacaacagggggaaaaaaacccggcagaatggatgcctatctagaactctaagcattaatcttaaatcagttttcggggaattttgatgaatactttttagaaaagatgagcagactacctaaacaccacacaattttaaatcattaccttggaatgactttactttcatgtgccaaactgactatggtgtgtatttaatatttgacataatattcccatgcgctttaagaaatccatgaagacttccaataagatagcctttgtatttgtgtgtgtatgcacaccagtgtaatttgcatttccatctcctgatgtgcaggtcttgaatttttgtgtgtgtgatagtgtaatggagcaatggtgacaattgctaaagaagctgattctccagtggatactgtttttctttttaaaatattgatggaataatatcatccactttgctgaagaaaaaagggatcacagaaataaataatggtttaatgagaagatgaatgtgaggaatgctgttttatatcatgtgatacctccttttccctctttctgcacatctgattattccctcctttaccaagggtgagctagatagttggcaatttatgctttagtttctttgtgctgtgtgtatgtgcatgcatgtgtgtgtctgtctgcatctgatgatttttacaatgattcttcagattcatgaagtatgttattttttattgctttcgaatcccctgtgatattccttactcttccggatactccatacatctgactgacctacttatttctcatttatcatttcctactaattttctcatcattttaaaaggcttattcttcttgcatataggctgacatgaggaagtaagtatctattcttagagaatgacacagggaacgaagtataattctgttttctgagaaaacattgatatgtgggttttaattatattagaaaaccaactctacttttgaactattgactttggtcatattcagtggtttgagtttttagggaacaatccctacccactggtttctttccagagtagaaattgtatctatgacttgtagaaataattaatattaatcatgtcttgtaaagcttttctacataaaggctttctttaaatagaatgagctctttatttgccttgagtagcaatgtctcccaattatagcaacagggtttctgtattgagaagaattaattttaaaattctatgattatattacaagagaaaaaaaaaacaagaaatgcgacctttccaacagttttttttttttttttgtacaggttcattttctttataaaaagtctgagcaagaaagggtcttgctttgttttttctctttagagcaacaagtgaggcctcagcctataagaaaggaaaagctccctgtctcacggctcaatcgaattgattcggtggggccatcagtgtggtaggcattggatttacattggcctcatagtctgtcaagccgctgaagggaatttgcttgccactgtgaaggtggttttctgaaactgtctctcctcttcccgcttcccttcctctccctcccccttgttaggaagatcatggcgtgaagacaaacagatgcctgctgccaaaatgtgctacttaacctgaccctcaactaggcccacaaaggagggctttgagatccccagagaggcagcccctgcatttcatcatgccgtgaaatttggagtgaaagccccatgcctctggctgcttagccatgagggatatggtgatgatggtgcccggaggggactgggaagccagcgagaaaaaacacaaagtaacagcagggacaaagacggcctccccctactgccctgctttgattgttaggtggtctataaactccgagaaatagagggcctagggcacaagagcattttgttgtcactggttcatttagtcctctgggtggggatgcggtggaggcagtgatcaggagtcttttctgagctagaggggtcactgattttgctcattaacaaagagcaacagcaagtacatttcccaaagaaagagagagaagcttatcacttcatgggaaggacttgccttatatctgacagatgtgtaacctccaaaaatatttagtatcctctatttccaacagaagatgccattctgatatttttgccttgtattctctttgtaatatattctttgcatgttagtctatcacatttcctctttaaaatgagtaagttggatatgagtttcttgtttttctataaacatgaatacatttctattatagtaaagaagcagaagagaagcattctgtaaattataaacgtacattcagtgacattagaaataaagcaaatctgtttcctcttggtgaagtgagggtacattatcagcagcatcttggtgaaacagttttctgaggatacagggtatttaagttactcttatgaattgatatatgtataacaatctgaatgagttggaaagaaactaataaaacatggaaaataattactcttccttctgtgtgttcttgtccagttaaactgttacatgtagtggcattaaattacattaagctgcctatttaaatttgtgggatttgtacactttattttaaatctccaaaatgatttcatgtgtgagtgagattctttttaagctccccccaagtggaagaaagcaggcatgaatggcatcatctatattgtaaatatcacatgtctgttataaaaatgatgttcttatataagttattttcaggtgcattagaatttcacttagggaatcttatcatttgataaagcagaccttcgagtgctgtctttttgaagtaattagattactcgttttaccagtggtatgcatgctttggggaaaggaaagctaggtcctttctctctgataaaggaaacgtacatgtcttcaataagaatcattttcttttctttgttctactggtctacataaagcctgctatacttctaaaaacatatccagcagtcgctctaagcattgctaagatccaagctcccacttgtcccaaagctaaagttgactctaaatagcctgtgaattatagatcatttgtcttcatctcagaacacagcagaaacctctggagtgcctctatgttgctaaaatttacagttttattttcatgcttaaaaagatcaaatctatctggaacatactcttctctcatcccacctgcttttgcctggttaatcctactcattattttgttttctgcctagacatatccctttgcccagggaattttgcatagttgtcacttgggttaggttctccccatctgtacttctgtacgcctttgtctcacggctttgatcccactgtattgtaatggcttaattttgttctccatcatattctaaggtcaaagcatgcagactgtgtgtttgatgcatccacgtgctcctaatatctcttggattgcccaatgcatagatgtgaatcaataaatacatacgcagagaaggtagagagggaggttacaaagtaaagggagactcttgtaagattagaaatgatattggtgacacaatagataatcagaaaagttatggctacattctttgcatttttgatgtcacaagggttaaaaaatttcagttcacatgtatcatcttagttgctttcatcaggtagtgtcagtgaagaaaacaaactactctaggtacataaactagaaggaacttaatacaagggattagatgcttctaaaatgattagaggtgttgaaggaatggactctaggctcagcctccagaagtgactctaaaacagagagctgactctcctgcttgctctgagccctctctggagtaacaatgtgagagtcaagggccatcccctgatgaagcctctacagatacccaggaagctggagaatgaagacttgaagactgcagcagaaaaccctcacattttcacaagggttctaaaccacagaaatagtgaacaaggcacaagcaagaaaatatcttctgttttctttttgccttcaaatgctgcgtaaatatattgatgagcataacctaattgaattcagaatttcagtggcatgatcatctgggaaatgcagcttctacttcctcttccactggaaggtgggtgtgatggatgttgaatgcatacttttgtactttccttttaactttttcagtttcttctctccaatatggtagctaccagccatatagctttatagatttaaatttattaaaattgaatatttcatctttcagcctcattggccacatttcaagtgctcagtagccccatgtggctgctggctgccatattggatggtgtacatgtagaacaattccattcttgcattatgttggacaccactggtctaggtaatgtgagctactccttttttcttttttctgcatttttttggttcagcagagcagctgatgaatgaatgggtaaaggggtaatgaaggtaagcttagagttaatcaaaacagtgttcagttagctaagttgtaaaatgcaaaacaacaagaggaagagacatctttggttgagtccttaaatgtgtatttcagtcaaggggataacaagggaaaacaagcacaagaaactgacatttgcattgcccacagtatgaaggaggctcttctaaaccctgtgcaaaatctcttgaaagactgcagtagttaaacaaaccttcatgatccaaacttactgagttagtgcttgctgctcgttttggttgagttcacaaatagctttcattgttactgtattatgatggaattccattggccacaagaacttcaacatcactctttttgtggtgaagagagaataaaattaaatattcaagtgaggttgtacaaatttcaagtttgggttaaaggccaaacaggttctattataaacggagttttccatccataactaacatacattctccaccatggtgtttccttttaagcatctgaaaagttatgaatatgatgtctaactcattaatctggagcagacctaccacataatgccaaattgaatgagtttgctcagggatgcactaatgtcttagaggagctttcatgttgacaaagctggggtgatttgatctggcaagggagacaggaaacatgaaagtccccatgagatttggctccctggtcttttcaagagcacaccatgccttccttgagtttgacatatcagacaaccaagccacacagatagatattaagctgtcagtgttacaagctccttctatcagaagaggattagtgttgacactgttgctgattggtctcactgcacagacatgcttcattttaggttctctcttagaacctactataatcactcacctctcagacaaagagatgcatttattggaaacaataagccaacagcatatagttacccatggcattcttatatattactgatataaacaatcttgttaagcaagaagcagatattataaataagacaggcttataagtagctctgtgagatttaacacagggacaaagagcaaaatcccattcctcctgtgatgtatgccgcattttgtaaggtcattagcacaggaagaaaggacaccaggccacccaacttgggaataagattgacatggttctccaggactaccaatcaaatgttttcttaggagatgtgtgttgtcaagaaaatgtgtaggaaaaaaatatatatggagataaggatcagagctagatgagcataagcttttaaacatagcaccaagtgagggaaatcctaatctccattcaacttgtcacagttttttttttaaccttgcagcacagtgatgtcagaatcatgctgtgcagattcaattctgaccttcactggggagacgggcctggctgtttaagttcttcgaatgctgtgactggtgattccagttgagttacgcaaaatctgatctaatgaacacttgagattctggacgcacaacatggatcccgttaattcagcctgtaaaacctggctaatggctctgccaggattcttgagttattttgattacctgggggtcagtattggagaaagctgagcgatggatttgatagtctgccgaaggatatacagatgtcctataatcagattataattttaaaaaattgtgtgtctgtgtgtgtgttacactttctgggttggaaattacatgtacagataatagtttctagcccttactgattttttagcactttgattaaatatgcatttttattttcccagagaaaaggctgtcttgttatgtatatcattttattaagctgtctgtgcgccagtaaacttcccactgagggtgagtttttttgtgtctttaggaaaatgttcatgtgaggatgtaagcttcctcctgtgaggaaaggacacctacccctcctttactgctctgtcttggcaaaacaccaacatcagttttccttcattggacttttaataaacacagactgattctgctgattttagaattcatgtatgaatgtagccagggagtgaacatactactgaaaactaatacttatctaggacatgccatgcagtagtttgcaactgcaaaagaagtaggttctatccatctcctatcttcgttgtgaggaacatcgtgcttggatgttgtaagaaggacttatctagtataaaggagggagggacacagagggtccaagaggcaaattggaccacagtgctgagtgacctcgtttcctgtgttttgtaattagaagtgatggcagagaggaaggacaattgggatccttacagagtcaccctggagcttacctgggacttccaagatgactgaggctatgctgggtcctctactttagggtttctgaggctgtggttaaaccaccagtttatacagcctattgaaactgactttacagagcctaaaagattctaggttttgtctctttcttcttgaacagttgcttgggaagacatatcatctatttggtatgaggtttcagatctgaagcatttgtctttaaatctgtttattcctataagcccattgataggaacttaaattttttaatgctctctgcccatagatttatatccataatagctttttaataatgccagctagagaaaacttgtgatttgagattttaaataattttaagattattttatgaatttattttttattttaactttaaaaaacacacttaagttatgagaacactgcaaagaacttccatatacttttcatctaaatcagggtattgcaagctctctgtcaaagatttataaatattctttgctggcttggtcatctgttgcaactactcaactctgctgctgtagtgcaaaagcagccacaggcaatatgtaaatgaacagacatggctctgttccaataaaactttatttacaaaaacaagaggtgggccacatttggtccctggtttctagttgcttgacccaatctagacttaccagtcgttacctttcctttttttccttttctttttcttttttttggctatatttgcttcatcatattctctctctctgcatatacatatatgtatatatacacaaatgtataacgtatacatatatactatgtgtatatatacacacacatacacttataatcatttttttccaatcatttgaaaagaagatgcaggcatcatgattctttacctccaagtaattaagcatgcatttcttaagaacaagtgcattctcttagtaactactaagagaatctactaagagaatggaattatcaaatgtaagtgataacactgatataataccaacatcatttgataaaattatcaagtgtaggtgatttaacattgatgtaacgccaacatctaatctacggtttatatttaaacttcactgattgtcccgataatgttctttatagccttattttgtctgattcaggatccaattcttcattatgtgtggcatttgttgtcatgtatctttagtctcctttggtctggaaccattcctcagtctttctttgtctttcaggacattgatatttttgaagactagaggctaattgctttgtagattgtttggtatttcctcttggttagattcaggttctctataatgggcaggaatcctgcctctgtgagatgctgagtccttgctagtgcatcctttcaggagacacctgagtttcgttttgcttttttcccccattcttggaggcaatatctttgatccttttgttaaggtgcgctctgctaggtttctacactggaaagttagcactttctcttcataattaatatcttttaaatttgagcagtgaccatgggaatactatttgaagcttcaatactgtaccaaaaatgccatattagaagattgcggttgaaaaataggaatgcaaagaaggtatgctttgtcttccaggtaagagaattccatgactttgtctacttcaagaaacttaattaagtggaaaagaattacactgagagtatggttttctgattgctttcctctcatttacttatgtagtttctaaacacttcccccgaaactccaaggactccctttgttgtgaaaaagtagttgtgataaaatgaggcccgtgtttcctgataagtttcgcagtgagagagtcattgcccttcggacgtttcagagcaagttgatttgtgatgcgaacgtctcaggcctgatgctgttgtggttgtgctaggctggcatgctaatcctctgtgattgaggctgcaatgattgttcaactgcacttcagagggctgtctgccaaaagatttcattattttggcaagacacagtgcacttttcgacacacaggattgtaacaatttctatacagtaccaatttagagctggagggaggccatgaatacttctaaaggcagtagggtgcacatattttaggaaatatatttgggagaaaaaaacagctttcatctaaaaagcaggtccacagctttttagagaaacttgctgccattaattcagaaaacagaaatggtctttgcaaacttttgtagatagcattgttatatgatatgaatgtatacccatataaaataaaaagttggaggttttttttttttaagaaccccaaggcttattctttatatccaggcaatactccagacaaaattaagtataaggcattatttgattttttaattattcaacagaaaatacttttgtgaaagaaaaggtactgggctatggtctcaggatatcccttctcattccatgttctggccacacacagaatattaccacaccattcaatcttagcttttggaaatgtgggcaagaaatgtggcactttaaaaacaattattagaacatgcttgagagactggaattaagagaaatttgaatttcttttccaattaaaagggaaaatgtaggtaggcattagggaaatatgaaagaactataaaataaagtctccttattggtcccctagaaatggaagagaactagattcactaagtacctactatgtgtagacaccttaaaaggtggtctttataaatttcatttgaaaaaagtccacctgagcaaatattttttcactgttttatgtatcagaaacgtatagttgagagaggttaaaataaaacttgaatgggaaaaaatcatttagcttgaggtagatgagggattctcctctgggtcagtccaaatctaaaactcagtgctcttttggttgccttcagacttggctagaatcatgagtttcagagtccctcacctgggaagtggcctgacttatctatccattcaagactactaaagcccagccaccagaattgcatccacgaaggcacacacatctaaacatcagtgccttcccaccatattggaaacctgtggcttattcacacaggttatcaacatgccacatgatcattgtcacatttccctacatccaaatgcttacatcctctaagctggagtgaaactgtacgttcatgtccagtcctaggcagagccatggatctaaaccctaccacttggccgttgcctctgtgaaaatgtttcagttttcaaatctggaagctgtatagggttgggttcaatgataggagtgatacgttgcctctctaaaattcattgttttcatattgtaacccctacaacagtctctgggaccttgatcaattgataatttcctacttcttctacatcttcaatcatcctgatcttcagtcagacttcctccgtttgatcctttgttttctgcctattaacgtgttccagtcacctcattttgaagcacaaacacgtaaagagagaacaaaacagattaaagaaaaaaaaactttactaaaccatgaaatctcatacaggttgccattctagttttcgcatagcccaactcctaaaatttttgacactccaatttaattttgtctgtacctctttatctgtatctttgacgtttgcttgtaaatgtacatgctatgatctttgtagagacttaaggtccttgaaggcagtcccttgtgtagttcatagatttagccataggcccatcacttagcatgatactgtggttatagttagaactcaggaaatggttgtaaaaggaataaattaatgatgagagagaaagacaaaagaaacttataaatgccatcattagctttaacctttatcctaaactgcatatccacaatttcaatagcttgttggacaacactccttgtacgtaccctggacacctctaactcgctgtgttaagcactcagttccgtatctttccccatgcttgtttctccttcttccttcgtcttggtgacaccatcagttcccttgagatctagattggaaactttggtgcctttccccatttgatttctctcatccccacttctcaaaacaaattggtaaccatgttgatgagattgcacttccatattccctttcataggttaacatccttttcctcctttcacccaatgtcctctgacaccctggtggcatactgacactagaaatggcagacagaagattggaagacgttgtaaagacttttgctctggtttactttactgcaatgtctcacctctctaatccatcttctgttccaacacccaagtcttcataaacacaagttggaacaaacaattagttctgagtgtgtcagtggctcctcattgaatccaagggctatccttccagccttgttttctgctatgtgttttctcctactagcaatcagacaccatactccccactccatacattcaatattatccttatcccaaatttacttacagctggtcaagttctagtcacagtcacccttctaagctgatttatgggtccctagttctgtgaagttcttttcaatgatcctctatgaaaatacatatcctttttttcatttcttatgacttttttttggttttgtttgtttatttatttatttatgagatggaggcttactctgtcacccaggctgtagtgcagtggcacaatttcagctcacgcaacttccagctcccaggttcaagcaattctcccacctcagcctcccaagtagctgggattacaggcgcttgccaccacacctgcctaatttttgtattttttggtagagacagggtttcatcatgttggtcaggctggtctcgagctcttgacctcaagtgatctgcccacctcaccctcccaaagtgttgggattacaggcatgagccaccacgcctggccggcatgtcgttcttaactcgtttattttatgattcactgatgcggacttatttatctacatacttttctcccataagagattccatgctccctcagggcagaatgaatcatgccacatttccccctgtcttggtgactagataagtactttgcacattagaaatattaatccatattgttgatttagctaatttgttgctaattcgaacagattgaaatctatggacctgctgcttctttgttttagcatgggttctattcatttagcataatctgatcacgagttccacttgttgattattggataatgtaaaattttgaatttcgtgtgaaccttttttgctttagaatttattgtgatggctgttttggtaagaacatttcttctgctgtccttttatgaaagtgtttggttaaatgtaaagtatggaatttggtgccaaactggccaggtggtgattcacaaagtagtatccacaatttccttgttgatcagtacttccactcatgagttggaggtctctctctgtgacatgaaatagtcttattggttgtgcttatatgaaggtcttggaatgcgtaacacctagggcattctggaactgaatcccagagagatctgggagcaccatagtttactaatcccatggatttgcaaagtacttttcagtgtacagatatcttttatatacattgtctcatgaatcccctgtagcaagtggcataaagtgctttatcatggaaaataccctttatttgagtgtgctaaagcatgggttcaatcccaattgccccaatctctcccagagtcactagctttgtttccttaacctctcttaacttcagtgtttcctctctaaaatgtaagaataattgtgccctttttaaaatttttttttcttttttgagacagagtcttactctgttacccaggctgcagagtgcagtggtgcattctgcagtctcaaacttccgggcttaagtgatcctcccacctcaacctcctgaatagctgggactacaggtgcacactactatgcccagctagttttttaatttttagtggagacaaagtctcactatgttgctcagtctattcttgaacttctgggctcaagagatcatctcatctcagcctcccaaagtgctggggttacagacatgagccaccattcccagccaatagtgcataattttacatacttctatagatgtgttgtgatgaggctccactagacaaatagttttaaaagtggtctgtaatctgtaaagtttctatgttaagtagaaacatacttagtatctacctgccaaacgatgacatatgcgattagctctctcaatctacatatttttctttgaaatttaaagtgtttcttcattggaattgaagcagtagcctcggaagaaatgattttagtctatcatcctaaaacttgaaagcctaaaacctttgctaaaaatataaactttggttactgttttggatagttttaggcagtacatgatcatggcgcctataggagtttatgtaatacattctaaagcaattgtctcctggtagtagtatttctctcataatcactcctctcgtggaagagagatgtggggttgtcacaaggtaaaccccaaaattggagttcagtctgggaggccacatgggttcttggcttcatgcaggaaggaattcaagagcaaggctacagagtaaagtgaaagcaagtttattaagaaagtaaaggaataaaagggtggctgtgccataggcagagcaatggcatgggctgcttgattgagtaaacttatcattatttctagattatatgctaaataaggggtagattatttatgagttttctgggaaaagggtggggagttctggaactgaggtttcctcccccttttagaccatatagggtagcttctggacattgccatggcacttgtaaactgtcatggcactggtgggagtgtcttttagcatgctaatgccttataattagtgcataatgagcacatggacaaccagaggttgctttcatttgccatcttggttttggtgggttttgactgacttctttactgcatcctgtttcatcactggggtctttgtgacctgtatcttgtgcaactagtcctgccaacctcttatctcatcctgtgactaagaatgcctaacctcctgataatgcagcctagcagttcttggcctcattttacccagcccctgttcaagatagagtcctttgggttctaacacctctggcagggctgcagtcttttgacatacctttttttttttttaaattgcttgcagaaataggaagttttttgttctacatgaagtatgagagaaagtgtgtcattgtcgttttctcccgcaacactttagcttttgttgaaatctttttttttttaactggccagagtattataaagaaatagacttttggcaaacttatcctgcaaacatttactcagatgattgtatataggttgtgcttgtcagagagatttcatggaggattattaaaagaaaatgttggctgtcattaataacattttgaaaaatgtctttagatactgctgattactagttactggatctgaagcaggaatgcaattaaaatagagctttaaatgaatgacatatactgatgctagacttggcagagcttctggattaatagcaaaacaagtgtgttgtgtattgctttgattagcattccagaaatatgcctgtttttgtaaatagtatttgttttgtataaggtatttgacaattccacaagctctcaggaccatggttatgtgggattatggagatttcaaaggcttgagactttttgtgcaccgatatctatagttgtgaaaatgcaactgtgtacacatgtagcagcatatttttataatttatatttttagcaataagagaaaacaaaaatcacatgcttattttcagacgttgttagccacatagcatttaacagtgtctttatggaataaatgtttgttgggtgtttcttgagtgaaatgataaagacttaccttgcagtggcaagagtgtcatgtattcatttcaaatggtcttgaggaagaattaggtcttagcatacttttaaataactactaaacatttttgccttgaagcaaatgtctagaaaaaataagtaacaagagctttgaggacaaagcattgatgtagccataggaaacaaaaaactagttctttaaggaaatcataagtaagttggataagtttttttcttttctttttttttttttttgagacggagtatcactctgtcgcccaggctggagtgcagtggtgtgatctcggctcactgcaagctccgcctctcgggttcacgccattctcctgcctcagcctcccgagaagctaggactacaggcgcccgccaccacgcctggataattttttttgtatttttagtagagacagggtttcactgtgttagccagaatggtctcgatctcctgaccttgtgatccgcctgcctcggccttccaaagtgctgggattacaggcgtgagccaccgcgcccggcctttagataagtttttaaacaatgtttcattactattaaaattgtttttcttttagaattgctatattgatgaaaaatttgtttttgaacattcttgagagaagtaagcactgtaacttggggcaggctcatatatgtcttagaaaagaattattaaagagctcaagtttttttaaaaaaatgaaaataatttaaaatgttcatatgcaacattactatgacatctaaaaatttttttatgagaaatatatgttcttaatggcacttatatgaagcaagaaagagacattactccaaagagtaatggtctagggattgttcacgggcagagattcagctacttgcaaggtaagtctttgtcatttcactcaagaaacatccaacaagcatttattccataaagacactgttaaatgcaaacatcaaatttggtggcagttcttttttttttttttttttttttttttgagacagagtcttgctctgtcatccaggctggagtgcagtggcatgatctcagctcactgcaacctctgcctcctgagttcaagcaattttcctgccttggcttcccaagtagctgggactacaggcgcccaccaccacacccagctaattttttgtatttttagtagagacaggttttcaccatgttagccaggatggtctcgatctcctgacctcatgatctgcccgcctcggcctcccaaagtgctgggactacaggtgtgagccaccgtgcccggccaatggcagttctttttaaagtttactaagcatcagaattttcagtagaacttgttaaaatagattcctggaccctggtcccagagattcagactgtaggttgagaatgaggcccatgaattttcatttcacacaaactccaaaggatgcccataatatcagtaattgatcacactttgagcattattgttataaagaattgacagttggcacaggggcagttgatttcatacatataattgataaaaagatggcaacaaatattgaaaattaagtttcttcagagttttccagtgtatcttctaactgtatctgtattttaaaacatggaagagattactagaaaacagagtgcaaaagtagtattgcttcaccatatatccggaattctacattatacatatctgaaatttaactgagaatttctactgtcatttgaaaactcatcaataatgaaatagaaataatatagataaaataaccatgaatgtatgagagctagggctatgcttatatttagatgactgacatctgactatatgactattaatgtttaaaattacaacttgcattaaatataattttgaggatcaagtttccatgcatatgaatgtaacattttttttttcaaccatgaggcctggctactaacaatcaggcacacacagacatcccgtatgtacacactatatatgctttatttttatttttatttttatttttgagacagagttttgctctgtcacccaggctggagtgcagtggcccgatctcggctcactgcaacctctacctcctgggttcaagtgattctcctgcctcagtcttccgagtagctggaactacaggtgggcgccacaatgccaggctaatttttgtattttttggtagagacggggtttcactttgtcggccaggctggtctcaaactcttggcctcaagtgatttgcacacctcagcctcccaaagtgctggcattacaggcttgagccaccacacctggcctcagagtatatatattttatatatcatgtgtgtatatataatatatatagtgtatattagtaataaactatattatatgtgcatataatttgtttatccaacaatcttactatttattattacaaacgttcttgaacaatggagtctggctagtgtctttgatttattagaatgtatatagtaataagttatatgcatgtatgtttaagcaaaccttattttctgttatgagactctcatgtcataatctaacagatttattcaatgtattttaatggagtgattaaactcgatgtatctgagtgctgttggattcattgagataaggacacaagttaacaataatacatatgtgtacatacatacagacataaatttaatacaatgcattttcacttgtagaagagtgtacaaaaaatagccctatgctgccaatttaaaagaaatgtaatattaacttttatgaggaaaaaaatcccatgaaacaacaacctttagaaagtatttcttggctgggcgcagtggctcacgcctgtaatcccaacagtttgggaggctgagacgggtggatcacctgaggtcatgagttcgagaccagcctggccaacatggtgaaaccccatctctactaaaaatacaaaaattagcccggtgtggtggcaggcgcctgtaatcccagctactcgggaggctgaggtagaagaatcacttgaacctgggaggtggaggttgcagtgagccgagatcgccccatcacactccagcctagggacaagaatgagactttgtctcaaaaaaaaaaaaaaaaaaaaaagaaaagaaaagaaaatatttcttactgaatagaaaatatgtcttaccccaattcctccagctgatggtgacgatcattacttttcctgtaagtcactgccgggcgctgtaacttttcctttccaattgtgttgaaatacattttttggtccgcgttctgtaatgatgcttttgctcagattcgtgttatacccagttaaaaagagcagctgattctttggttttctaaactaactagaataaacaggcattgaaaaagcaacaatcacaggtgaattcttttttcctctcagctttgtttgtttccatgttttatttatttttattgttcctctcttccagtgcctggagccctgcaaggaatcaggggacctgaggaaacaccagtgccaaagcttttgtgaggtaggagaacgtcagtggtacttaaaacacttgacccaaatctgactatgcttacgtggggtcatgggaatgaatgggccttcttattcttctgcagcttggggagatcattaactgcaggtgtgtgtggatatacgtaaattcatgtaaaaaatatagagccttcttaaaacctggctacccactgcttgcattattggctaaccagaccaaaaaaaaaaatatgatgtgtagatggaagactacaggctttctaaaggtatagattgtcaccaccctcccaccttacatcatagctattctgagtagtttttacatgcttttgaagtattcatgccatttgggagaagagactcatattattgctaatggtgtttctcaaatattttcatctctttgttcccctcggggttcctcctcatatcctgggcagaatgcttgcccgcttttaactgtacaggaggcatcttacttcagctaactattagttagattagtatctatctgttcatctatccagccagccagccagcaagccatccatccatccatccatccatccatccatccatccatcatccatccatccatccagctatccatccatccggctatccatctatctattatctatctatatctatttgtctatctatccatccattcatccatccagccatccacccttgtatctacccattcatctctctatcatccttattgggagaatgtgtaatattgtcctagaggaccactgtctaaaatcaccaatagtgcaaaaaaggagatctgctttactggactgtcttccctatggaatacagggggcacaggccctgtaccagcctggattctgctgagaagtaaccagacacaaggccaagcagactgcctggttccaaggattccaaggacagtggacttgagaagtaggagaatctgaaggtttggggagaatagtagagaatgagtcaaaagagtccattttggcagtcaggagagctcagttgagggtcttggccagaagaggtgcccccgacatcagaatgaaatgatgttatggattatctttgaacagaactggggggtgaaagggaactcttccaaggatccagagacattggtctggtcttcatccactatagcaaataaatgctagtgtaatcccattgcctatgtttcactctggatcttattctgagaaaatgaatgcagaattaggacaataatggcttcatcaatatgtattgtgtgtaaaatatcttcataatcttacttgacctttcccatactcctgtagttaagcaaggcagatagtaagtccccaagagttacgtgtggaagccaggaaggactgggaagttgaggctcctcagacgaatggcttgtcaacggtcaaccctccaggtagaaagactgggtctaaaactccttgattttgatccctcttttgatccctcactgattatctgagtgttgttcctggtcaactccgcttggccaatcaccaggggtcatagtgggtttgggccccttgagatgtagaaaaaacatagcagaaataaacaaaactggtgatttgctgcaaggataaggagagtgaggccatcccatgtctttgtttgtgttctgcttttaccttttctgtgttcctactttaactattttaaaaatatctattcattcatttattcaacatgaactttttgaatacctataatgtgccctgcagtttggtagagatgtggcagtaaaaaaatcacgcaaaaattccagcttttgtggggcttattttctcctggatgaaagatctcagctgtgaatgatggtaacttgattctaatcctaactgcaaaaccaacttactctatgaattcagttaaatcaattaacctgtgtcttcaacctcatttttcaaatgagggatttatcctattgatcttacacggtgtttattaaaatagataatgaatgtaagtgcatggtacagagcttatcaagctgtacaaaagtaacacaatgatatttactttgtattatgtgttataggcttgtgggtcacagctctgtgaggtatctgaatcaactatttattctgaatttttacccgcattggtaatccttgtcaacacaattagagcacactgtctagtggagtgactgttgtgctcttaactttaattttctaccctattccatacacaaactatacatctataggcacaaaaataaatatttatagaatcttttttttttttcggtttcccatgctggagtgcagtggcgtgatctcggctcactgcaccctccacctcctgggttcaagtgattctcgtgcctcagcctcccagataggtggaattacaggcgtgcaccaccatgctcagttgatttttacatttttagtagagacaggagttttgcgtgttagccaggcagctctcaaactcttggcctcaagtgatccgcctgccttggcctcccaaattgctggtattataggcatgagccactgctcctgacctgtttatagaatcttgaggaacaaggtgtttgttttataaatttattatccctaaatatcagtgactctgggctgatatttttacatctgatcgctgagaaggaagatataattgaaggtcatttgaaacctttcttcctgtaaatttcaaattcaagagcaggtttctgtaattgccattctctgaggtaactgtgaggtgttctgaaccaaatccagtttattaaaatgggactcaggtgtttgaatgtgatcccttctggcatgaaaggttaattgaaacttgaaaggtggggaaaacagatgccatttaatgtgaggagctttgatgaattgcttcagcccaacggttaaataactcaagacttgatgttccattttagtggctttgattgtttttaggtccctgtgtgttttttgcatctgttttattttgcagtaagtatctgactattgtgttgaagtaggctgaaccttgaaaacactgatggctgtttcagcatttttaagcctagtcacttatggagacaggcctaaaacaatcccgttcatcctccccattctcacattatttgttaagaatgcacagaattccatattgtcatgactctaagctttccctttgtaaaagttcagacccagaagggactctagattacattattcttcaacggaaacaattacactgttagacatgttcggcccggtatgtttacctgcagggcagtctgagcttatttgtcttctaaggcataggtttgcaaaccatgactcgcaaggcaaactggtctgcctcttgttttataaataaaactttattgaaacacagccacactggtttgtttacatattgtccatggctgcttttgtgctacaacaacagaattgagtacttgtaacattatatggcccttatagctgaaaatatctaatatctggccctttatagaaaaagttttttaattcctgctccaagaaaaagaacaggctgggcacagtggctaatgcctgtaatatcagcactttgggaagctgaggcaggaggattgcttgaggccaggagttcaaggttgcaatgagctatgatcatgccattgcagtccagactgggcaaaagagtaagagcctgtgtcaaaacaaaaaacaataaaacaaagaacagtcataattatattacaaaactcatcttaccatttagagtactgttacttcttaatctgtattatcagcacccatttctaaacataaaacattgttcttggtaattttaatcacaaataagttttcctacatggaggagacttttggaggcatgttaataacaacatacctagaattggttcatttcattctcatatcgtgatctctctcacttctcatttgattaccgattttgttataatttgcacggtaacttttgctacttttaggctaatgtcagaggtaataatgtcttcttctttttcttttttttcttttttgagacggagtcttgctctgttgccaggctggagtgcagtggcgcaatctcagcttactgcaacctctgcctcccaggttccagcaattctcctgcctcagcctcctgagtagctgggactacaagcatgcatcaccacgcccggctaatttttgtatttttagtagagacggggtttcaccatgttggccaggatggtctccatctcctgaccttgtgatccgcccgccttggcctcccaaagtgctgggattacaggcgtgagccaccttgcccggccaataaatgtcattttttaaatgaagaagttaaatgtttgtatcaaaacaggaaaaaaattgagatatttcagcagtcctctggattatatgagattttattttcatgtatcaagtttttggaacatggcacgtaatcatagatacatagataggcaaatagattctgttttgtaggttcagtttattaactaaccattatcactgttcttttcttttctttctttttttttttttttttttttttttttttttgagagaggtttgctctgtcgcccaggctggagtgcagtgtcatgatctcggctcactgcaacctctgcctcccgggtttgagcgattctcctgcctcagcctcttgagtagctgggattacagacatgcatcaccactcccagcttattttttgtatttttagtagagatggggtttccccctcttgtccaggctggtctcgaactcctgacctcaggtgatccgcccacctcagccttccaaaatgctgggattacaggcgtgagccaccgtacccggcctgttctcttattttcaaaaatcttaaaaaccatgacaaactttttttaaccaaatacaaaatatacattttcctaggttgaaacattcctttctcacaatcaatggaatcttaaattttaaatggcattatttatttctcattcttaatgatcttagttttggtgaaacttgatatatcattgtttatgacttgcctccttgctgaatgaaacagctcccatctttgattttgacgtttctgatgcatggcatctcaaccctaagtaagaactcagtggatgtcagcattggataaaacagctggtaaaacagctgccatctttgactttgacgtttctgattcatgaaatctcaacactaagtaagaactcagtggatgtcaacattggaagtatgcagtacctgttaacgtcatagaaagctgaaaccttattggcttcagggatcaatcaagggtaaaaatacaagttgtttgggatgaatatgcatcctgagataagtagtctttctcagcctggaaatgggaaggaaaaggaggttttcactttactacatatataattatcaagtaatttctttgcgattttgcattttgaaatgtctttcaggcttatagatttgattcccataacagtccttagaagaagttagatgtgaatttcattaggtaagcttgatggacaaggaaactcatacacaaggagaagagatttatttgtccaagatcacatggttggttagtggagtataagatctaaaatccaggtggtgtagcttctagttacatttctttcctgctgtattgtagggtttcccttctaaacctattctgtgtcacagcacacagagcagaggaggaggttttacttccctcatcagggaataaaagatgagcctgtgtcgaatgtaaggttcttggcccagtcatccctgcttggacaggcttatccttaaatgagaaggaagttttagtggtttaaaatcatagttaattttttttttctttttgagacagagtctgactctgtcacctaggctggagtgcagtggctcggtctcagctcactgcaacgtctgtctcccaggtttaagcgattctcctgactcagcctcccaagtagctgggattacaggcacctgccaccatgcccagctaatttttgtatttttagtagagacggggtttcaccatgttggccaggctggtcttgaactgctaacttcaggtgatccacccatctcgacctcccaaagtgctgggattacaggcgtgagccactgcgcctggccaaatcatagttaattaatggcacctcaaggagagaaggaagacagggctccttgccccttcacgtggctctgaaagaaatattccaacactactgaaaagagacctcagaaagtaaaagggttaacatgcctctcctgtggggatttcttgcactcaaaactttttatctcttcgctgctctataactggttttatgtcttaaaatttaaagtgataattaaatgcatacctgtagggattggaacagaacctgtacctgtctggatatgtctgtaaaatagttaaaggtcttgaaagaagctgatgagagctaaacgtgaaagtgatataatattccccaaatgtgtgttggctggaaaaggagaagcacatagaatttgtaccatttagcaatgttttgctttaacatatcagaacaatagcttccccaattagaatatacttgtgaaagggaaataaagattaactttgttgctattctttttaaacagatatatgtccaaactgaaagacagactcaatttttattacaaagattttccacttggaaatattttcctaagagcattaaaatatggctcctgagtacttccttttaaggaagttgtcaattctttagagacactagaatgggacctgcagtagtgtgtctagtgggtgagacactcaggctttttcttttacttggtacaatctaatccactgagcaaatgagagatagtggtggctcagtctagagtggtcatggtgagagattcaatatgaggaacgggagaaagagttgagtcagtggtgttgccagggcttttgtccttaaaaactagggtaagaaagctggaatgtacgagatgtgggatatgtgtcaggcacagatagttttgggggtggggtggggagaaagaatagaccagaagtttggtgttgagcatggcatgtttcagatgtaaatggaaatccgtatgagatgtgctgtagggaaacaggcataggagtttggaatttaggtgagagttctaggctgaaagaacaaatgccatgcatgaaggtactgtttaaagtaatgaagctcaatgaggtgacagaaagaaaacaggtctatgagttaaactgaatcacagcaacataagaggaatagggagatgaagaaggagatttaagagaggccaataaattgggagaaaacacaggggagtgtggtgttccgatagccaaacgatgaaagcttttcaacaaggaagaggtaatcagttgcgtcaagtgctgcaagagcatggagacttcaaatttattaatcggattctgcgacagggagctcactgtggactttgacaagagcagtgttattgggtggcagaagaaaatgcctaattggcatgaatttcagataaatggttggaggaaacagagagggagtatagaaacatttcagtgagcattactgtaaaaaaaaaaagtgatcaggggcgcaaatgagattgtgggaagaggtgtgaacaaggtaatcaaacatttaattgtttttagagtagagaaataattatattttacaagcagatgaaaattattcagaagagaggggttatttgatgttagaggagaaaggggggaattgctgaagcacatgaccttaaatggcaatgtctaccattgtgtgtgtatggaggcaggtttgaaatgggagcaagcttctacgtcctgggacaggagatgcatgagaattcatggatacatgagaatccatggatgcatgagattttaatgcaccagatgcagctgcattggtgggtgtgaaaatggcgtctatggaacttctcttttgaatgctttacttttctcagtgcaacaggaatcagggtgaccagctgagagtaaggaccagacaaagggatggaggctggagtgactgacacatagacaattttcttttcttttcttttctttttttttttttttttgagacagggtcttgctctgtcgcccaggctggagtgcaatggcacgatctcggctcagtgcaacctccgccccccaggttcaagcgattctcctgcctcagcctcctgagtagctgggattacaggcacctgccaccacacctggctaatttttgtatttttagtagagacagggtttcaccatcttggccaggctggtcttgaactcctgacctcgtgatccacccgcctcagcctcccaaagtgttggaattacaggcgtgagccaccgcactcagccacatagacaattttcaaaaagtttttagtatgataaataataggcttttatttttaaaaatgattaacattggtattttacatttttgtaacacataaaagtgttacttgtatttctagatggtgttacttgggcaccaatgaagagatgcagaattcatctaagtcttcttttcgacttaggggacgtagtagtagtaaagtggaaatgttttgaagaatgcttatgaatttttataattattatgagatattctttgccaaccaccatatgatgggtacagtctgcattgtatcaaattttatagatctggaacataaactttttttcctttttaagcactgagactcaatttttatattttttataaaatataaaaatttttttatatttttcttatattactcgggggagtatcaaattattctagactcagttgtaggagaattgatgagttttgaaaatttatgggaccaagactggagattattcagaatgatttaaagacctaagcctgaaaagaagggctaggcaaataggcacataaggagttaggggagtatcatgaaaattgcaaaagcactaaatttaagtaaaaaaattttttttgaatgcatataaagcacttaatcagtatctgaagataacacacattacatatatattagctacttttattataaaagaggaagacaaggagacaaggtcaacactttttaattctattggaggtcagtgagatgcgaactaaaagggctcactgagttttgtagttaggaagtcactggaaatctgtgtgggagactttctgtggatcaatagtaggtaacagatacaactctgcgttatagaataaaatgtaaggaggaaattcagaccaaatacatgcaactttttctataagtttaaagtctttccctaacactgtctctagagcatagaggagagagaagaggctgtgtttagggggaattcacagttgagaaagtgatttttgtgttttaccttggaaagactggaatacatttatatgtcaggggaaatgaatgctgtcaggagtgtgaggtcagagatacatggagcacaaattggataacttgatctctggagtaaggaactaggggtgaaggaaatgtaaatatggagagggagaaactcatgcatctgaagatgccaactccagtgtccagcatgatccagaactggccttctcagacttggtcacgcacatgaatcatctaggaatctgctttaatgcagattctgattaagtaggtatatggtgttcagtaggcatatggtattcagtaggtatatggtgtggccaggagagtctgcatttccagcaagctcccaagtgatgctaatgctactgaaccaaggcctagcctttgagtagcaagtgtgtggttgtacttcttggatactggggctccctgttttagggatagccatgtttatgcctgtggtggcacatgcctgtggtcccagctacacaggaggctggggcaggaggattgcttgagcccaggaggtcgagactgcagtgagccatgtttgtgccactgcactctagccagggtgacagagtgagaccctgttttaaaaaacaaacaacaaaaaagcactcacttgaagttttctaccaattctgtgaaaccttctgtgatttgtgcagtgatagtctatggggagaaaatgtgcaattgcttaaaatgattgaaaaccagcagatgaggctaggctcagtggctcacacctgtaataccagcattttgggaggccaagacgggaggatcacttgagcccaggagtttaagaccagcctggacaacaaagtcagaccccatctcctcgaaaaataaaaaataaaaaaaatcagccaaacatggtgtcacatgcttgtggtcacctgtggtcccagctagacaggaagctgaggcaggaggatttcttgagcccaggaggttgaggctgtagcgagccatgttcgtgccactgcactccagcctgggtgacagaatgagaccctgtttcaaaaaaaaaaagaaggaacaagaaaaagaaaaaatcagcagatgaaaatggttctttataaataaaaacaaaaaacactattttattattcaagatacagaattataatcgttgatttatctttattccccaatgcattgtaaacatgatagcaggaataaagtttagccttctcatctcatgtaactagcagaatgatgtactcaggttaaatgaatcaatgaatgaagagagtctccttttatgtgagttggtagagctttcatggaggaatttagaaagaattctgatatttatcttctctaagaagtagaagctcctgtatgagcttaaagtttatttatttacttattgagacttttatatgttatttccattttttagtagacataagactattcacgttgtctatttcttctttagtagcatttataacctatgtctttgtaggaagtgaactatttcatccaagttatcacattgataaaaatagcataggtcatattatcgcctaattcacctttatcgttagcattttgatgtctgttaggtttgtagtgatgaaccctttttgcaatactgacattggtaagttatgtattctctactttttcttgattcatcccaatagaattttgtcaattttagtgcttctttaaaaaaaaaaaaaaaaacttcttgttttattgtttttctttatttttttgtcatttcctatgctattgatttctgtcctttattatttccttacttttgcttaattttgattagtttgactctctttatataatttcttattgtaggagcttagataattaatttgagaccttattttcctttcatatataagagctttatgctataaattttgccctatgcactattttagctaaaacccacattttgtgttatagcatgtttttatttttacacaggtattttctgattacttctgtgattccatttttgaatttcatatgagtgtatggtttattttgtaaatttttgagaattttacatatatcttcctactgatttctagttaagacaaaacttaggatttctatccttttaaattttttgagaattgctttttggaacacagtatgtttcatcttgaatgacttcatgtataatatgaaaatgtcataacaatatactttcattgtttactcccttcatttgtattcttagtgtcctaaatcatacttctacatttgttgcaagctccacatcacatttttatggtttttgctttaaacttatcttcttccagagatataaaaataagaaaaatcatcttttaaatataatcatgtatttattatttctagaattcttcattctttgtgtagaccccaaggttcatctgttatcattttccttttgcttttaacatttcttataatgctaggttgctggctatgagttcaccttttgtatacctgtggtagtctttaaggcatcttcacttttcaaagatatttcatgggtataaaattctaagttgattttttttttaaatagcattttaaagatattgctttattttcttccgacatgcatattttctgaaaaacctttgagattcttatccttgttttactatatataaagtatcttttaatttttctatctgctttgaagattttccttcagtatctggcatatgaagcaatacggttaagtatactttgagttaattatctttgtttcttctgcttaggggtaattgagattcctctaactttggacatacaattttaatcaaatttttaatttattgttcaatattatttattgatttctcccatcttctctcttctcttgttctgagactctaattacacacattagaccagcttattttgtctcatgggtcaatgagtctatgatcttttttttttccttttggtcatttcccaccctctgcttcattttaatagtttatttatttatttatttattttaaatcattgtgtctttgctttccttttaagtaatcttatcttctatggtgtctaacattttaaaaatcctatttgacatatttttcatttcttcctttttacttctggaatttctatgcagctctgttctgtagctttcattcctgtcctccctatgtccatgttttcctctacattcctgggcatatggagcatatttatattagttcttaaatgtcctttgctgttaatgctatcatttctataatttctggtcctgcttctgtagatcccttttttcccattttatgtgccgcaatttcctgcttctttgcacactggattatttttgattggatgtcaaatttttgtgttttgaattttgctgtatctttccagaaagtgttagactttgttctggcatgtagttaagttccttttgagattcattttcttatttttaaaagtttcttttaagctttcttgggggcgggttcagagtagtagcctttagactaggcccaatttatcccattactaggtgatatccttctgaggactctagccaatgcttcatgaattgtgcattctctgcactctgactggttgaaatgtgagtttttgctagaatggtttcctttattgctgtctgattattctttccccagacttatgcagtttgaagccatgcacattcaagtcagtattcagccagaaatcaaagggtccctctgaatccctgtaggtttctctcttcatgcagtttcatcctgctttacagtctgcccacaagatctggccatctcagcctcaagctttaatctctttatccacaacttggaaaaattgcagagctatcttgggattagccttccttgcactgtggatttgaaactacgtcaaatcatttttttggcaaaattgtagctcatctcatttgtgtccttataggttttcttgtcttgtgctacctattgtccaatgtctgaataacgtggttacatacacaagaggacttcagaaagttcatggaaaaatggaatcaaaagccaaaaataaaacatataagctttgtttcccaacataagctccatcaagcttaagacacttttataagtgatgttatcagccacttagtccatccctaaagaattgagggtcctgggaatttaaccatgtcaatgtaggttttgaaaaatattattcactgaagaaaaatgggtgctctttaaaggttgttgtttttttttttttttttttttttttttttgagatggagtcttgctctgtcgcccaggctggagtgcagtggtacaatctgggctcactgcaagctccgcctcccgggttcacaccattctcctgtctcagcctcccgagtagctgggactacaggcgcccaccaccacgcccagctaattttttgtatttttagtagagatggggtttcaccgtgttagccaggatggtctcgatctcctgacctcgtgatccgcctgccttggcctcccaaagtgctgggattacaggcatgagccaccatgcccgacctaaagattcttataagaacaggaaacaagaacaagtcaggagacaaatcaggactgtaaggtggatgcctaatgatttcccattgaaactctggcaaaattactgttatttgatgagaggaatgagcagggccattgttatggtggagaaaggctctctgatgaagctttctcagacatttttctgctaaatctttggttaactttcttaaaataccctcgtaataacataacattcaatgttcactttggggcagggttttagcattaagatgaggtggaatttggctctttacatcgaaaagtgaactacaggacacagaatttgtgcacagcctctataatctagctgaaactggcttgtggtctgcagttgcttatcagaaaataatctttataaggccagtcttctgtccaatcagagttgtagaggtctgggttgtaaatcagagttgatagctcctattgttaacaagtttagctataggaatttagaaatgtgccatgccaaccaagaaccttagcataccccttagttgataaaggggcatccattttggtctctcagatcatacccactagatgccaatagcaccttccagttgtgaggaacaaaaatatctccagatattacctaatgtcccctgggaaccagtcccttaacttatggaatttgtactttctcttacttgttcataacgaggaaactatgttctatgtacattagtgtattggtctgttttcatactgctataaagaactgccagagactgggtaatttataaaggaaagaggtttaattgactcacttttcagcatggctggagagacctcaggaaacttacaatcatggtagaaggtgaaggggaagcaaggcatcttcacaaggcagcaggaaggagaagtgcctagtgaagggggaagagtcccttataaaaccatcagatctcgtgagaactcactcactatcacaagaacagcatgggggaaactgcccccatgattcaattactcccacctggtctcttctttgacacatggagattatggggactacaattcaagatgagatttggttggggacacaaagcctaatcatatcagttagtttctatttcattttgtgatgatctaaccagtccagaagtggtataatatagtagtgtataaacaaagaaataagaaatttcaaggaagatctctaagaggtaaaatatgagatttttttttcttgtatcttggatggatgtgatgagtttgtagaatttgacagtgtttgcaaaatgagatgagcaaagaaactgaacaatataaatcaaagagtaaacaactgtatttgacaactttctaatttgttcctctttaaaagaaattatttacatgaggattttaggccatctataattaatgtatatggattcctattgtttcttgtaaaatttctagaactgcgttaaagaattctgatgctaataaaggtggctagcactgattgcacctttattatgtgctaggatccatgctaagtgttttggaagctttatttaaggcttagggtaatattttatcttcctttaatattttgaagaaagtgacacttgccaaattaattttgccccccaaattgtacagcagttatcttgcttgtgtatttgtcaagctctgaaggggacaggctgtatttgtttctgttccctctctctttttcttctgttttccacatcacttttacttgcctaaatcatcagtattgatgactggtctttaaagttttgtccttgtctaattatttgttgatctcgtccttatatctgtaacttcctgtgtctacctttattataatgcaaactaaactgtttaatgatttttacctgtttgttagtaaacatgtaaactaagcatagtgggtcatcattttcacaatttcacctgttcaccattaaattcctagtacctagaatgccggtttggtctataaatcagtatataaatggtttagtgggctgaacattgcattggcattcttggtattcactactaacaaatgcagaagtaggagagggaaataaatcatagtttaaatgtggtacctgaactatccctaattctctagggatttgtgaacttctcgagctatttatgtgcctcatgatcttccagaaatattgcagcaagattctgaggtgttgctgactcatacaaggtgacacatttgttttcaaaataaatagaagagccaggccaggaagaaggaagccaagataaacataagtaaagattactgtaattgaaagaagagggtatgtacttgtagaaaagtgacttctctaatatgcgtgtttctgcttttctcctaattttatattttccatggccaatgtctataatttgcctgggaatccaattaattgcaatcacatctaagaaattagtatttataattgggcttccaagcaaattataataatacttccaagcataaattagtaacatttgaacggagagttatttttcttatttcatgcctagtgtttagatgtcttctttgaaagacacacttggcagttttgcctcattttttaaaagtacaccctattttcttttttgagttggaatctcactcactctgttgcccaggccggagtgcaattgtgcaatcttggctcactgcaacctccgtctcctagtttgaagattctcctgcctcagttgtccaagtagctgggattacagttgtgtgccaccacacctggctgattttttggatttttagtagaggtgaggctttgccatgttggccaggctggtctcaaactcatgacctcaagtgatctgtctgccttggcctcccaaagtgctgggattacaggcgtgagccaccacacccagccaagtatactatttatttttaatagaaactatacatgcccattaaaaattaataaaccgcacagaaaagtaaaaccaaaccatcattccagatttaccatgtagaaacagccatggtttactgtgcagaaacgtgttaacacagcaaggccaagactgctctcccaatgcctacttaaatggctggccaagaggccagcacctggaagctctgtgcacactagtttcaaataaatgcttaaagtttaatattacttgaaggcaagagaagacaaagacaccccaaaatattataaagaaaagattataaaagatattatgtggttggaattgttactctttcaattccatatttgttttattatttactgatgttctaatattaagttcaagataagtcacactcataggttttctccaccactcctcccacctaccagtttttctaacatattattatttgaaaattcttagttttatcacagcaaattctccctcctatcattcttattttatttaattttagtttcatacttaggtacatagaaaaatgattaattttactgattcttttttccactgtatgcttaattttgtaaatttaattcatatctttgtttttaaacaggggtctatggatggtgttttctttaagtttatgcatgataaattttacctacagttatatctaaagtacacttggattggacaacttttttttcttctataagtattactttattttatctgggtaccgaatattgtactagcccatttgttcttgttttctgtttatgataggatggctaggttttgccattgcatggcacatcatgccccctgcccccaacacaacccccccacaaggcacatacactcacagagtttattttccttagaattatatagacattgctttgttagcttcacatactaaatttagtagagagacatttggtagcaattatattttcttcctcataatcagcttgccttttttacctgaatgcctgaaaaattaaagttttccctttggtgttcagaagcagaagctatattccagtgttgcttgctcttttcagttattcttggaacataacctgccctttgatttataatttttttctattaattccttgatctatctttctttcttttcttttctttcttttccttttttttttttttttttgagatggagtctccttctgtcgcccagtctagagtgcagtggttcaatctcggctcactgcaacctccgcctcccaggttcaagggattctcccatctgagcctcccgagtagctgccaccacacccggctaatttttgtatttttaggagagacggggtttctccatgttggccaggctggtctcaaactcctgacctcagatgatcttgatatttctagtttatttcttaactttatgtttttgtcttatttcacattttatatttttgtttaactcttttctaacccttttcatctcatttcattgtctcactaccttgtcttcatgctcttgtattgaattcatgttctgttcatctcgctgtgttttttgggagtgaagttttcagaaatttggaatcagaccctttggccaggttagggagggggcaatgctgagatgggggcagcagcggcagaagtcaaactttaatgattttaacattttcaaagtgcccaggacatgtgtacaaagacacatttaatggaaattgtgtaggttgcttttttgtttaatcttaacatttaatcttaacattttctgatttaaaaattgtaaaatcttgtttaacaaaaacttttatgtattaacatactattttcctttcattacagaattgtttataaaagttcctttgttaaaaaataaggatcctttttaacaccacagcatttgtactgttgctttttaatatagtgaaaatacaaaaggaagagcatgtgctatttttttgatgtcactgacttcagagacactgtgttcaaagaattaccaacatactttaattcagtgattgcttggtgtttagaatgtcagtgctttaattttgagcatcctgaaatatatcttttgtacatacagagacggatgtatcagaatcagattttcagtaacccctggattatagtttggagtactttaatttagttaccctcagtggtctctaggagtttatgtacacttagattttctgtttataaatgcatttagcttttctgtatctgggtagatggagctattcaactactcagcatagaattaagattaaaaatttgtttgctaaagaaaaggaataaaaaaagaaagaaatttgaaatcaccccactatctcttcccaggaagtgtaagattgcatttttgaatattcaggttatttctaaacatgtagaatcaggaagtctaataactgaacacaaattagagagctattcatccagcagatttctagtcttggccagacattgggaccatctgcggttctttccaaagtgcagtttccagggtccatgcctggaatgctgaagaaacgggtcagaagttcacccaagacatcagttttagaagctccctgggaaattctaatagggaagcaagctgagagccactgggtgagcccagtcctcttattttaccgtgagatatggtggggccctcagaaaacactagctctcatcgttgcccagactcttacgtgttttgtgatttgggctatgttatgatctccctgagctgttgtttccccatttttaaaatggaaataataacagttgtggggactggggaagaataggtgaaatgagaaagtaaagcagctggggtagagtgagggatgtgatagacatcagcatctcttggtgaccaactgccactgctaatgatgatggtaatgatggtgatggtggtggttatgacagtggtgataatgatggagcactcactttaggaaattgtatatttgaggtttcattgtattcagcaatcccagttgttggctaggagcaggaagcgaagccccccattccctgactctttgcaaaggcaattataatcctagagaattgacgtatggtacaagtctgttgaattgaaccaaatagccaaatgcaatgttctcctcatagctgaagccttgtatttatgtgattttaaacacattaagataatttactgaattggatgtctttatcattccatgattgctgaacagattattttactgtacaataccttgcattttataccaaactaaacaaagatagtactgtctctctttctgaaagcattcaagaaatgttgcctacttttgttagtatttaattttatttttagctacttgccacaggtggataaattaatgttttattcattttcttcttagtggagcttagcatattacccaggtaagtcactaaaaaccacattttagtttttagctcttaggagatgacatgtagaagggatatatgagaattcattaatactgcatattaatatatagtatgacatatatctattcgttaacatatgaaggattttttacttaatccaatgcacctcaaagatatttttctttaacactttgctttatctcttctttggaggcataatgacatccattagatactattaatcactaatctagaaaaaatacataatctttgcagactaattctttcttagttttggggacagtaagggcaaaataaacaaaattaatgggcatagtgaccatattcttttcaaattttaaattggagccaatgacctggcaaaagaatgacatttggctgggtgcggtggctcacgcctgtaatcccagcactttgggaggccaaggcaggcagatcacttgaggtcaggagatcaagaccatcctggccaacatgatgaaaccccatctctactaaaaatacaaaaattagctggacatggtggcgcatgcctgtaatcccagctacttgggaggccgaggcaggggaatcgcttgagccagggagttggaggttgcagtgagccgagatcatgcaagtgtactctagcctggcgacagagtgagactctctcaaaataataataataataataataataatttgagagtgacatttgtgtgattcgtgaaattaatcatatgaatagttttataaaaatgaattgtagttataaaaactaaatttacagttaacaatttgccttcattacctgcatataattttagaaacaggaaatagaacatagaatctatgttgtcacacgtgtttattgaccataaaattgatgggtattacatgcatactgatttgaataagtctttttctattattttctcattccttttaacaaatctctgagtaatttgtattatcacatgaaattttacatgcttaatggtcagaaattattatacttttgtgacactcaaattacctttgttcacaggatttcctactggagaccaatttgcacattttgtttatatctagagtattaatattcacacagcattttctctgacctgtacacatttttctccttattccattcaatcaataaattctcattaaactattattaatgacctggagagagaccttatgtacacataccatatgttctctaatttatattcaaacaaataatattttttcaacccaatccaagagaattatgaaagaaaattaatagacagcatcaaaacctccctttgataaatctgcctttaatagaacagttaaataaagctcctctgtaagactgttgcaccaaatccacactgctctaagatgaacttcatttaagtacagggtacaattcctgagatgcagatttcagtgcttaatctggaagtagtgggttggaatctagtggctggacacactgtagaagaatacagacttccttctgtctttggatcttacaaaattttcatgagcacaccagaagaattttgaaatgttaaagagtaaacttgtagcagtgataaaagaaaaaaagacacaaattacttaattcttattgagtatgtattgtgggccaactatgcacaatagtgcttaattctttgtgtgtgttacctcatgtaatattcataatgttacctgtattatttcaagattataaaccagtctagaaaccatgggtgcaaagatgaacatatgtgtttctatgtccttaccaaaaaggaaaacattgaatatccatacagaataactctcatatcaactgaaagatctaaattgttgggctaattatgatcattccccttttatagtcattgggaacacatgcttcataactgttctaggttactgtctttgtttatttgtttttatgtctgccccaatagttcagtaaataatgaagataaggagacatagcctctgttttcctgtccctcacagttcaaatgtgtggcagttggcatatagataattagaataatatacgaatacaggatccaaactttatctgattcttgactcatactctgttttcatagatgaagagtatgaactgagttgatttcattatatcatgatgcaaactaagtcactgtgatttccaagttaccaagcaggaaacacttgccagatttaatacaagtatttctttttttttttttttttttttgagacaaagtctcgctttggttgcccaggctggagtgcagtggtgcgatctcggctcactgcaagctccgcctcccaggttcatgccattctcctgcctcagcctcccaagtagctgggactacaggcacctgccaccatgcccggctaattttttgtatttttttaagtagagacagggtttcactgtgttagccaggatggtctcgatctcctgacctcgtgatccacctgcctcggcctcccaaagtgctgggattacaggcgtgagccaccacgcccggcctaatacaagtatttctacttggaaatctcagcccatgaggcactggccaatgattttggtaactaagtattttctttcagtgtgtgtaatgtatatgaattgttgaaagaagaaagttggcaaatactacataattgttacagatctgttagcatacttctttgattattaacttaggtttgaaactaaacttagagcttcaaaactcaatgaagtaaaacacatctaacagctaacagaaaaatggactgtgaaatagagtaagagataaaagccttgagagttaataatgctttaaatacttataaagtttctttttaattaaattagctgtaaatttgtcataattcaatattgacaccatggcccttctaagttttaccttaaagttcttaaattgagaaataattttagttcagtcaactcatgttattttcacgttttatgtatgattaattactaacaaacaattttatatgacatctacaattctaattcaaaccttgaaattatagtttttctagctagtgtttccactgttttccttttgttaattaagaaaagaacaggcatttaattgtatttaacttgtaatgaagtactaatgctttgtcatccactaaatttacaatatcagaaagattattgtcactatgaaacaataacaatttggtgctgcacacattctcatggtataaaaattttctgtctctttcacagtgtttttttaaaattgtggtaaaatgcacataatataacatttgccgtcaactcttacgcatattttaattgaacattgtttggggaaaagaagcaggtgagacagtggagaatcatttacgttgaaattgtagtttattctaggattactaagatattccttgctgaagttatgttttgagtcttcagtggaatttccagtcatcatcaatctgagaatcataggctaaaattaatgaactaactgccggaaaagagagacattcctcccaccaaccttccacctcccactagagactttgataatggtggttttgtttgtttgtttgtttgttttataacatacctccactattggtgaaatactctctggttaatagcccaaaccattcagtctcctgcctagataacctcctatctccagggtatctaggtgctaccagacacctatctgactaaagggtcatggttgtttaacagtgaggagtagccagcagcatgctggcaggtttggcaggtgttacctcgtggtagggagccatattcaatcactattgagaagcaacagcaacacatgagctggtcttaccaggtgttgcccaggcattaccaggcaatggtagggatgacccggtgttacccaggtgtcacgatggtgcagagccatatttagtcatcagggaggagcagcaggcagcacacaggcgagtgttcccaggtatcgtccaggtgtaacccaggtgtttccagatgttaccagtaatgagccctggttagggatcactgtggagcatcaagcagcatgctggcactgagctgcttgatgttcctattctccccctagacttctgttcaccaaagctaccacatttatttcttatattcctaaccctgttgtgacatcaaataaacagaaagtgtcctccttgttcatcttccacttccaacgttgaggaaccatggcagcccttcactggatggcctttgcattggttcaggtaccctgaatggttgtagcaaacggagcttgacatgtacaagagttcaaacacgtgtgtacttgctttatacccatgaagcagttcaaggcagctgttcccggcagggtgctgtccttctccatatgggcagacagcattctggcgtctctcctcctgtggccccaccattccctcattccctacagctgtggtgccacccatatccagctaataaagaagaacacgggggcaccatcccccaccatctgcaagcctcggtccacagtggcacagaactttgctgattacgttccattcacaacaacgtagccacccccaggtaaaagagacagtgaaatttaacctggctatgcacaggcattccaggtgaaaatgcattttgataaaagaaaatgtcactttgataggagaaaagaaaacaaatacatctattttgttaaacattcaagcagacttcatgtgtctttaatggaatagtagttatcatggaaaccatctcccataaggataaaaggaggcttggtataaaagttagggttatggtgatcatcttttcagccatcttctataaagcaaaaagagggttagggatagggctgggtggagggctggggctggtggggctgtcttggccattctcttccataggaaaaaggagagcaagagcacagagagcatccttccctttctttccctggatgggacagcttttagaaatctcagcaactcctctgttcagtggcagaaaagagccattatcttccaattgcagctcctgtcttagggatgaccgagtgctgtcctgaaccattttttcctaaggaaaaataggcatttgataaatggctctttcacattactcaggctttttcaataatgcattcctctaataagtccagggcttcctattctcactaatggttgattgattctgggctcaaccaaaatgtcctcagcaagatgctgttcagaccccaactgtgtcacagataacataggtgtgggctgatttttaaagaagattcacattcttctactgcagaactcattgacaattccatattaataataaaggctggaaattattgaaatatgttcaattagaacgcttagacaactgtgctatacaataccaataaatatgttaccattgtgagaattgtaaagttttatagagctcctgctattttgatgagtatttatgatatatgagaaaatagccaggtgcaatggctcatgcctgcaatcccagtgctttgggaggcttagagtgggagatttgctggaggccaggacttaataccaccctggacaacatagcaagacctcatttctacaaaaaataaaaattagccagggatggtggtgtgtgtctgtagttctagttacttgggaggctgaggcaggaggattgcctgaggttgggagttcaaggcttcagtgaactgtgattgcaccactgcactccagcctggggtgacaaagtgagaccttaactgtaaaaaaaaaaaaaaaaaaaaaaaaaaaaagggagaaagaaaaaattaaagagagtgatgtgttataagtgtaatgtatataatccaaaaagggccctcaaattgtactgaacaggttttgtgactataatcagtttttttggaaaacatctttgaccaagatagaatatatgatctgtgaacgtgggcgcatatacatggtgtttgtctgttgcatgcaatataaaatcatcacttatggattatgttcctttgagaaatcagcacaaaatgtcacttggataggagaaaagaaaacaaatacatgcattttgtcaaatattcaaacaaaggtttggtggggaaaaatgttgaacttcctttcagatgtcttggaaatcagacttcatgtgtctttaatggaatattttttaaaattcttctttgacttagcctctcttccccaagaagagctacgaatgcttgaccagctgtgagttcctcaaatacatcctgttggtgaagcagggggactgtccggctcctgagaaagccagtggatttgcggccgcctgtgttgaaagctgcgaagttgacaatgagtgctctggggtgaagaaatgttgttcgaatgggtgtggacacacctgtcaagtacccaagactctgtacaaaggtaaggggcagcactgggggtgtgaagacacatgcagtgtcacatatatctgtgtgtgcctagggaagggtgtccatcataggtgtgaaaagtctaaaaaacataaaatctttagaaaatttattttataccacatacagacatcttaacataatcacagacccataaagattagccatattaactcgacatggggcagagcaagtcattcatattaattctttttaatttgacatatgtgatggacagcaacaattcaggaacatttttgtctttttcttcagtcagactgattcaagtaagctctactaggtacactggaataaatcgatttaaatccttagaaaataggctgggagatgaagcacacttgaaaaatgcataacaaatatactggtattgtgctttttctgccgatatgacccaagaacattagtgtcgttgtacagatcttaaatattttcattagtaccttgagattctagacaaaggatttcccttcctcaaaacatggaggttcagtttatcaaacggtttagcaaatgcaatagtttatattcaaaagccgtttctagagcacttagctccttaatatcgagtgctgctgatcattttctgtaaatgggactaagctcttttaaagccaagatgaatccattgtattaggtatagtttgggataccatcaaaatacaccgtgacatataacattttgttaattttgggggtctcattgaagagttatatagagcagcagtccccaacctttttggcaacagggactggtttcatggaagataatttttccatgttgggggagggggcaggggatggttttgggatgattcaagcacattacatttattgtgcactttatttctattattataacattgtaatatgtaatgaaataattatacaactcaccgtcacgtagaatcggtaggaaccctgggcttgttttcctgcaactggatggtcccatctgggggtgatgggagacagtgacagatcatcaggcattggattctcataaagagcatgcaacctagatccctcacgtgtaattcacaatagggttcatgctcctatgagaatctaaagctgctgatgatctgacaggaggttcaggtggtaatgtgagtgatgaggagtggctgtaaatacagttgaagctttgtccactcacccaccacttacctcctgctgtgtgacccagttcctaacaggccacagactgctaccagtcagtggcccgggagctggggacccctaatatagagtcagtcagtaggcagtattcattaaagtacagagagagtaacagatgtctttctctctctatgtctttcacatacacatgccaaatccatattatttctaaatactggtacttaaaaaaaatgtgtataaagaagtattcaccatcaatgccagttttgatttatgtgctggctgcctatttttggaagtccatgttactctaacacttacaacaattcacatctcccagaagttaagtatctgtcccatcttcctttagctcccacttgggaatactttcctctgaaatctatgtaattcaaccggtttttttttctttatcgttggaaacacaccataagtcctatgtcttacattcaaaataatcaatgcttttctcttcttaccaagtgatgtttctttaatagttttaaagttttattgtggtcatgcctcttattttaaattacagcaagtcacttttgcgaaatttaaaaccatctaacttttaaagcatctgttattatgaaatcttatctgtcattaaagataatatgctatgtatgagtagcattcaccataaaaataggatgctttgggaatcgtctttttaaacccttttgtaaaacctatagtgttttaaagagataatataaattaaaatatgcacttttataaaaggactgaagagttaatatgaatttcaaatatgcctgtttcacttgagaataaggggaatattgtagaacgggccagaataaatgattaagtatacaaagacactttcaatgtaaaactacgtttaacgaaaccaggtgaacttttgttaaagtactgaagtcactcttctactacaaattagctcttaacttagatttttgtggagagagagagaatcaatgggaatcaactacaaatagaataaacagactctgttaacctgacagtgacttttgtgtaatgaagacagtcaagttaatagattgttattttgcaaaaaaaaaatatatatatatatatgtatatatatatacacatatatatgtagatatatatatgtgtatatatatgtgtatatatatatatatatatatatatatatatatatatatacacatatatatatatgtagattttttttcttgctttcttcagtagtccctccaggaaggctggttttcatgtcctgggagctttgacagtgcctcttaatatgttagtgtgtgtaaaaggagggcaaatagagcctacagcaactccttcatcatcttagctaatgaggcatttgaagtcccttttggcattcccaacctggagtccagctgcttcttcactctcaaaagaggagagggggactgatgtacacaagccccagggaaagtgtccgttctaacccatcccttggctttgcaaggagaaaaccatgtgcccagtcagcgcacaaaccaacctgcaatcttaggatactcgtgatcactgtctttcctacctccaagatgccttcttattgccccaaactaatgtgaaataagattgcctccctctctctgtctctgctaggtctgtgtagtttttttctttaataagagtgggagtcatggtgggttgagattatctagtcctgctctctgttcacagctgctgaaacagaggttgcaggctatgcctaagtgatttggtagtaggtagcagaaatagatctaacatctgctcccatctgggctagctctcctgtcatttttattttgaatgtatggatctctaatggaaacactcactgggcatggttgtgttatgatataataggctaactaaggtctgacacagtggctcacccctttaatcccagcactttgggaggctgaggcaggagttcaagagtagcctgggcaagatggcaagatatccctatctctacaaacataataaaattagctaggcatggtggcatgtgcctgtagtcatagctacttgggaggctgaggtgggaggatcatttgagcacaggaattcgaggttacaatgagccatgatcatgccactgcactccagtctgggcaacagagtgagaccctgtcccaaaatgtatctaaatctgttatccacctgtctatctaataggccaactaaaagatttgtcaatatagaatatttttaatccaacaaaatcactactttatgaatcattttaggctaatgaataacatgggattgttttacattgtagagttgaagcgtataaaactagatacagagtgtgctatatggagaaccacattctatgggataaatattgaaaacctgaagttcctcattcattcattttttatgtattaaagtgttgcatagtgctgtttggaaatccgaaataacattttcttaacatttccccggtttacctttacaaggggctgctgtcacttggatggagaagtattgacacatttcagttgaatacacatttacggagtgcctactatttgctgtcatctataatgggcattggggtgcaaggatccatgtgacactaaccccccacatggtccagtagtttattactgagattgtcatgctcacaatactctttaagtgggcaaattgtttttctaacctttaaataaatggacatttaccaacctctgtatatatttcattttattacttaatgaattaatttttaaaaatatttttaaattataaaaactcatacatactttctgtttggtctgctgtgtttgtggaagggaagatagaaagtactggttttatagcttcaagagctttttatactggtcacttgagtttttaaaagcgatgggtgtcttgaaaatatgattttgggctatgctgtaagaactgcacttaactgatgcctggaagtaagttaaccttcatagactatagtttaaaacaaacagcagagatcctttcttttactttttaaataaaattattagcatcaaaatgaaggcttggaaatattaacatgattggagatgcctgctggtactagttctatgaaatgcaaaacttcatatagttgtagaaagtctacaggtagaatacaaatgagtgcatttgggggcactcacttcctttttcctttctatttctatttcctctctaagtctattttatggcttggtgagacaatctttcctccagagggtgatatattttactattttgttgccaaatcccactgcctctcttggcttccaactgtagcaaaaatggtttgggcagggagaaagaaaagttaaaaaattttacaaacgtaaagattcagactaatttgtgacctatagtttccttttgccatggataaaccaagaattaattgtacttcagtctgtttcttttcaaaaagacccgatcatagagttaatttaatatttccacaaataattaatatatcaaatagtgaaacttcagacctctggaaatagatttatacaacttctcacaaataaattttcaacattttgcatccagtagcccaatgccttaatgtgatgtaaatacaaattctagagttctaattacctttatgagagatatcaagtagtgattaaatcactagaacaatacatcttgctacatttttatatcatttagattcatgataaaaattaatagtaataaaatctcacaatgagtatgcaactgtagattgcttatcctaattgatttttctatccatatattttcaacatttttaaaaagcattgggtttctgttcctttgatttcagcagaatgtttcttgcatttcaaagaaaaaaactggacgtcacatattgcagtttgccatacgataacgtttgtaaatttttcaacagaatcatttagatttcagatgactaatttgttcaaaagtaattttaaagagaaaaatgctaatcatttacataataaaaaacacattgagaagagatccagtctatacatctggttatgcagttgggatgctggttcagccagtgaggactgtgcgccccggcagtgagggctggaggtcttgaggggggttgagccccatctgcacacaattacagtagagcgctggagttacttccaatcaaaggagccaactgactttaatggaaagcagatggaccatttcttaacatgcaaattgcagggtcatgcttcatcataattaaagagatttttaaatgaagaaatttgaactgacatcgccctgatgctcattacatttgattaaggctgttggtccttgaatgctattcaagattaaaaccttacagcgagggcactgggctgcttggattggcttctggtgagttcaggtcacttcggaggctatttactgtagctatatttactctagaagattatacattggaaagccaaagagaaaggtagattcagaagtctcggagaatgtgctctatgagtttgaagaattggtcatcatttttttttactatgcaccaaggaatcaagtaaatcatgaaatgttctctgcggctactctccctcgccttatccccttcggtagaactatttgtctggcatatgcaggccacccttcaatgcaagaatgatactaaatgatcaccttgttgagattggtttttcatcactctgaacaaattttggtggcttttttcttgacacaaaacatacagagctgcttctattaaaatcaattaactttgggttttctctccgatcaggaattggtcttttttttctttttaatgggaaagtcctatggtcagtgtaataaaaacgttctatcttgtaaacattttggcattgctttattttctggtatttatctttttaaaaaacagagtgaatgtacatgtgagtaataagaccatgctggaaaagagatctgagttgcttgaaacaatatatgataaagatggcagtacagaatacttatgataaatcttcacccttccctaggtgactttcaaacagagtagggattaccattgttgcagtggtttgcataaatgttgcactagtctcttatttccacagacatattcttgagtgaagaataagaaagtgggtttggctattagttcagcaaacattgactgttcattgaacatttgctattgcagaatgttctcttctgggacattgtgaggtgcgggaatgaaggagacatggtttttgacctctgggggctgtggcttaatggaaagacaggcatcattaaatgaatttgctgcagcaagaggcagttaaatgcatgtcttgacagttacaggctcaacattgaaggggggcaaaagaataaagcctttatttccaattgagaagtttaggggaagtgtcacagaggggtggcatttggtccgagcctggaaatattcaagggcctacagttagaaagcagaaggcaagacatttcagaatgaaaacaaacaaacaaacaaacaaaaaaaccataaacaggccatggtattattaaggacctggcagtgtatttgtaggaaagctgggtttaaagataatatctgtgacaaaaaattaaagatgtaccaggagatagattgacaaataaatggtagccaattatgaagaaggatgccttgaaggggatgccaagaagtttcccttcattctatagagaatgggatgcaattaaagagtttgggaaactgaaggagagaacctcgcttctacgttagaaaaataaccccaaagtaccaataaggggacagtagaaaaagagattgagatgcagggaaataggttgggaacaaggaagggagtaaagtcaggtggccatcatggagacaaaatgatttgataattcttgaaaatgtactatgcagtaagacaactaaatgttgttagctgcaagaacatatcaaaaaggttctaagatcccttagacatcctaaagaataaagttgtcataaagatagatatcccaggagaaggggcatatctgggacagagaaattcagcaggcaggtggaaaagatggtctgcagcttagccagggattagagatagactggaaaaacatttgcttagcagcagtatgctaatcatccaagtctaggtacccccattgctatggttatgcactgagatgaaaagtttacaatacaagcttgaaataaatgcatgtcatggcagaacaggagtcaaagactgacttggtgaagttccagatccaccaggaaagctgaggatcttagaataagaatgtccaagggatttgcatatctatcaaaaccatctcttttctctatctctctatgtggccttttctaatatgaaatgtagaaagcagcagataattcagagagaaacctgagatcagattgtagtcccaggcaactaatttaatattccttagattcagttatctcctattcaacatgtagataattaaccctttacccacttcacaaactcacagtgaggatcagatgagacaaatttattgtaaactaaaggtcactactcagccatgacccatcagtaataaaggagactgcaataggtatggtaaacattttctccagaaaatagctttttttagattaatgacttttgaccatatataaatatgctttaaaaaaattattcaattccatccatccaaatatttgatgactttaaaattttcgtaaacaagacttaccatgaattaagatcaaaatgaaataggagttgaaattcaaccatgtcaacatgcatcaaaccttatttgcatttggtgtttgcacattttccagtttcttctgtgtttaaacttacaaaatggaagaagaaatagagcattcttaactagcttttgaaatgagttttcaatgctttcagcaaacgaccattgtgtacagaaaatgctattaatggtaattggtgttcttggtgttgatggcattcaccatcatggagccatagattctatttcattcagttagttttgcatattctattagtattacaaatttctttacaaattccctttctgaaatgcctgctattttgaactgtggttcttcaatgtatcagttgccagacaacttgcatgtacagaaggcgataaagaaatcagaatgattaactactttaaaatgaaacacctgtgagaaacttttgaagcagcacactcactcatgccaaaaccaaacattataaattcattattttccaatgttaagccattaagactatatataggggaatgcttgagcaattgattgcggaatccaaaagacttgaactttggaaatcactcttaggagatttcacatgaagagattttgctttgcagtgttttccttaaatgaaaaactccctgagaaagaaggaagatcaaatctggaaaccatgttataatgaccttaggatatatcaatagacacagagcatgataaaaaatgggaaaatgacttgaaactctttataatgatctcctagtgtgaattccatgttaacctcaaatgaaacaaccttgtaacatgatttattgaaaagaatgcacatgaaatgattgctctagagattactagggaataagccacttgttacagaatcaggaaccaatttagactgtcttattaaaaaaaagaaaaaaaagacaagttaaaagaaaaaggagcaaatagctgaactgagtgtcagaagacttcagatgtgaaaccctgtatggagaggccacttttatgaaaggaaatctcagttgtcatcagatcagattcatctcttccatatttgttcttcctcaacttttacttcaatttgagtcacacgcagattgttttaattgatacggtcctgtttcaggtgtccccctgaagcccagaaaagagttacgatttacagaactgcagtctggacagctggaggttaagtggtcctcgaaattcaatatttctattgagcctgtgatctatgtggtacaaagaagatggaattatggaatccatcctagcgaagatgacgccactcactggcagacagtggcccaggtaagaacctcatatagactttgattttcatcctggaggtagtgtctgctacatagctacgcacaaaaaattaacttgctatgcctcaaaatagcttgactacagaaataaattactcagatatgaaatgaacatcatggggtcttctaaagagaggatgaggttcatagatacaaacgaatgtgctcggaaactcgaccattggcttaatttgttcaaatacacatggaagggagataattttataacctgattattcacatgtattttctccaagaaccacattttcctcagctaaactcaaagccaactagaggaagggaaatgcaacattataaggactaatttgacatttaataatctaaatgccttctcttctgtttctcctgcatttacacctttattccacccacagactttaggagcatggcataagatttgtatcacaaaattacttagtgggacatagccagcagcccataaatcttcactaagtactttcttctttgtcttagtcaacttaaaaactgatataccacctgcatggcaacactcccagagagtgcttcctcctcttctgtcttgttgatgagaaaagcaaaatattttctttctttttaagagctgttaaatccagtaccagctgctaaccacccccccacacacacacacaaaccctacatggatataaaaagtaacagattctgaatgtgaaactgtttcatgcctttagacaactaaaatgccttctccacatctatgtctataggaaaaaaaatctcaccttatgttgattagatcattttttccaaggactagattcctatttttttttttttcagtaaatgtaaaataaatgtcaatatttaggtgtttggaagaagaatatcttctaaatagcagtatctcaaaggggttaagcactaaaataaaacaatgtaaagaccccaaaataaataagaagtttgatgtaaaaacacaacattaaattagaaaaaaaaaaaacctggtcaaataaatttagtaattctattctatacctatattttatataaaaaaaatttgcttcagtaaaacataaagctaatcagaatacagcctgaaattccatttgatttacacggcatgctttcataaatcgtggtacagattcatttgtaatttttccaaattacttaaagaattatgaaagtaaccagcaataagaccatctcttttatctccaaaagatttttggaaagtgaaaagctcttttattattgttgctggtattattttttactgttagtgctacatgtagtacttccttctctgctaaacgctgtggataccatgctgactttaagctttttaaattcgcagctgaaactctaaatgatgaagttgaaagtgttttctcaaagtctgccaaatcaggtagaaagccacatgtaagagttcatattcttcctttgatctcagaaatgttcagcttcttttagatattgatgtaaacgtgacagtcattttcacattaagttattttaagctgaggttattataatctgaagtttgggagtgttcaaatccaatcctgtttccttagtttcatccacagatccaagttgagttcggcacctggtgtagatgagggcatagactgtagatggttatttcttggaattcaaggcaaaggttttcagatctaccaatggaaacaaaacacagaacattgttgaaagcaggtatatagtatgaagactgttaaagttatttgatatcttaaaattgtagcactagagacagcaaaaccttctgatcttccccagtgtctatttttttccttttgggcattttattgagcaaatatatgctaacacatctcacccttttagatcaggactggttcttcatagatgttatgtgacttactcaagagatttttaaacagtggcttgggttatactttacttccagaaattgctagtgggttgcatgtgggttgttatacctattttacagttatatttggcatgtgagttaaaaagacattttctttctataatctgaagatgatttcatcttcttgctgtaatgtaacaattactatacataaatattctctattgattgaatatctcaaatgctgtaattagtcaccagatttaaaaatagcccaagctcttgtcataaggttttgacttcaagagatgtttaattctttggggtgaaatatcagtggttctttgttccctgacagctctcttcataactgggcatgataagcccctcttatcagggggaagacagactgagttgcattggctgatgggttagtgtatttttctaaacagatccaactaacatgtcggaataaaaagtgacatgttccctgtgctctgtgacatgtcccctcagaccacagacgagcgagttcaactgactgacataagacccagccgatggtaccagtttcgagtggctgctgtgaatgtgcatggaactcgaggcttcactgcccccagcaaacacttccgttcttccaaaggtcagtcttccttttcttcccagacacagaatactatccttgctaccaggcacacatggaatgcagattcactgtctctatgttcatatttatagttagtcaacaggtggctttgctgttttagagaatgggaccagatgtgtttgaaggtaccatgtacatttatggctaaggacaaaattggaattttacctgcagtatatcatagaagataacataagggagtttttttaaactttgaagtggcgggggggttttcattatcaacatctgttgagtttttgctttaagatattctgtatcaaacaccattcaattgattttcaaagagaaagactgaattttagctattctagacaaaatagcctttcttgaaatgattgttaaattgaaagtgaatttgactcctacgtttgcttcataacatctagaatttaaacccctcctgagtcatttaatcattgctataattttgttcagttctgactgccttgatattttaaaacctctgtgtaatcagatcaacagtgtgttacatttgtggttaatctgtgacggttgaaggacataatttgaccagctattaataatatcttcaagtttatttttctagttgcatccatatggctgtgtaccttccaaattaattagacatctgcttgactaattataaggatctggtttcataaatacagattagttacattagtctcttactaataacaagtcatcttcttacacagaagctaatttaaatttattttattttaagtaaatttatttattgggacattaacaaatactgtaaccttacatttaaaagcctcttttttttaaaaacaaacaaacaaacaaacaaaacactttttttttctcctcagggaggcaaattcatgaactaagcaaactttaaagtgaaattgtaaataaagacatcaaaccttgtcttaagactctgtctccaagtgatttgaaaatttagagaggcaagtgaaataaataattaattgtgggttaggaggtagttatcaataaaaagcctcagaatgcttcaccttgagtttcatggttcaaatgcgatccagagatgttctggtcaaaatatattaccatctgttcagttgcctgcaggatttgggctggtgctctgtgaataagactgcaaaatcagacctcagacagaagtggttctcagcctctagagacagatgctgaattaatttcctgtaagagttgcagtggcacctcctgcctagtggaggtgaccaaggtggttttgctctcatgatttgttacagagccttactatcacaagatcctcaggatctgggcagaaatcctgtgacagccccagggtcatgagggtgctaactgaaagtaggaaggccaagctgtcctgacacttcctagtatatcggagcaacttataatctagaatggaagctgcatctcccaaatttaagtggacttttattgaatgaaaatgcaactattgcagttttcattaaaatgttgttctgtcactgttacaaatatacccaaaattcacattgcatatgtctcattgtgaggagcatcccaaactttagttcttgcaattttacaaaccaaaaatgtctgtacagaattcatggaagattccattatattttcagtgaagatgagtcctagaatgacgggagtttaacatatcagccaaagggtggtagacattccctctatgatatctttaaagcagatttaatcactaacaaggtgggacaacatccttccacacttttctcattctcaccaaacgttgaaaacagcctcactgggaaaaatgttttaaagaactttattgaaatataatttctataccataaaaatcacttattttaagtgtacagttgagtgatttttagtatttactgacttgtgcaaccatcaccatcatctagttttagaatgagtgcatcaccccgataagatccttcatggcttaccaggaaaatttaaaggtagaaataaagttaattctgtgtcttttgcctcttttattacccatgtatctgaactgcagtcctatagcgtgggagtatcctgtagcttggtacttgatctattccttagaaaaaagcctatttgggaaaaaaaaaaaaaaaggccaaaagcatagcagtcacagtgatcgacaaatgattactctctttctggaaatacgagcatccccaaggaaattaaggacttttcccttaagcactctttctctcaatagcctccatttgagtaatcggcaatgctgctcttgcagcagtttgtggcaaaagaggcctgcagtcattctccactctaaacattttctgcaagccaccgcaaatcctcagatctgccttgattcacctttccctgtgtttcccctaatccgctcagttctgtctttaactgggaattgtattagcttcctaatcacatccccacttctgcctcctggcttctgccttaaggcttctggattcctgtttcctgatcctggcccctcattcctgctttcggatccccacttccggatcctgggtttcagacccaggcctctcatccctgcttccggatttccacttctggatcccctcctttttagtcctctctcaacgcagccacctgagtgatccttctaaaatctgagccacttcccgacagttttttgctcaaagtgtcccagcagcttcccccatctgattcagagtagaagccatgttctttacaatggattttaagacccagttgaccccccctttctccttcctcttagacttcatcactaccctccctgttttcctgctcaacatgctaggctcctctgtgttctctgaatactataatctttcccttgcttcaggatattggcatttacctggtcctggaccggggatatgctcttccttcagattgttgaaaggctggctggctcaccttctttatacaaatatctctattccagcaaaaccatctttagccatgctacttatatgtgtaagcaaacaagcaaacaaatccacgttgcccgtgttgtatttttgttcttattttctgttatgactgtctaccctgccttagtattttgcttgttaatcttgtgcactgtttctccttgcactcaattaggatgaatgtgtgtgtctgtttctgtgtttcataagaccagatgtgttttcttttttacttcttattcccactgcctagaacagtacctgacacatagtagctgcccaacaaatccttgttcaatatatgaggaaatgaaacaagagtaataaaaagagaaggtaaagacagaaaatgttgtgttgttgtttctacctttaaattttctcagtaagggatgaaggatcaatctttttgggttgatggactcattctagaacccagtgatggtgatagttacacaacacagtaaatataagaatgtcagtgagcacttaagatgagacaattttatggtatggaagttacatatttcaaaaaagttgttaaagacattttttcgcagtgaggctcttttctacatttgatgagcttgagaaaggtagggaaagatgtggcagcatcttgttagtgtactggttaagtctcctttagacatatcctggagggagtgtcttccaccgttttactgatttgttaaactcccataattctgtgatgcatctttacggaaaacataatggaatctactatgaattcagtgcttacatttttggtttgtaagactgcaagaactaacatctgggatgcacctcaaattgagacatatggaaatgtaaattttgggtgttgtattagtctgttttcatgctgctgataaagacatacccaaaactgggaacaaaaaaggcttaattggacttagagttccacatggctggggaggcctcagaatcatggtgggaggcaaaagactcttcttacatggtggcagcaagagaaaatgaggaagaagcaaaagcagaaacccctgataaacccatcagatctcatgagacttattcactatcacgagaatagcacgagaaagacctgcccccatgattcaattacctccccctgggtccctcccacaacatgtgggaattctgggagatacaattcaagttgagatttcggtggggacacagccaaaccatatcaggtgtatttgtcaacgtgagagatagaacaacattttcataataactgcaatgaccgtggtgtttcaaaaaatggtgcattttcattcaataaatgcccatttatccctgtttgctccagaattgaaactgtgccagtcttccagtggtttaaaattacttttaaaaaacagtcaccacttccaaggtagtagtctgtgcaaggagtaagcaattatctagtgtatttggtttgggtagagagacagtgttgataacttaaggctgggtcaaggaaagcaggaagggtttttatttttatttttttcatctaccatgaatatctcagcaaataaaagtaaaattaaacagcaaaaataggtaaaatgagttccagttagtttaggctcactgcataggattcatggactataaaactgattttcatggaaaagccaaacttcttgtccttatcttctttatagttattttaaaacacaaaattagtccgtgtttggcaaaatggattgactactatttaatttcttcttaactcatttattttcccataacttagacctaactcaacattaactatttttatagaaaattctaagttattcatagattagtaaattagtttcatgcttttccttttcctggggaataccatttctgagtatttttattgctaactcttacccctcccagaaaaaatgcataaatataggatgggcaaaatcattaattttttaagagttttggataatttttatatttgcctacttaaatactgtatttcttcctggtacttgagatgggaaattggctttgaaattaaagatgcataatagtttaatagattaatgcctagtgctcatttctactttttgtctctttatttagaatgtgggactgcatctttgcacatagtaagttaccttcacaggtcattcctgggggtctacctaaagttttctatcccattccatttggaacaaacaacatgaaacctctgagcacgagatgttgatatgtctgcatattgctacataagttgatatttgctgctttgaaacacagatttcaacaaatagagattgcccatcaaagatcagacaccttcagaacctgatccaagtgaaggctttgagtgtgagcagtttacttaggaagtgatccaagaatgtggtaggtaggaagggaagtaggacagggtgtagaaggaatacagtaaagggtgaattatttaccataggcaacctaagcttcctctccacggggcactcagggagctagcgtgaagcacacacacctcagaactcctcgctggaggggggttaagggtgttcaagtcagtctttgtctgcagctgttcctagcgtatctggtctgcatgctggcggagcttgctctgagcccagacacagccttaggtgaggaggtgtgggagggcattcagaagttgagctggtgtgccctgaaacagcctagcacaagaaagtcagggtgggaccctgaaaacatctgttgtttacctcttgtttaactcaacatcagcgtgattcctgttacagagtggatctaatacattttgaattacggtttaaaataaatatattaatagtttcatgaataaaatgtgatgaaatcatgaaaggaattcccacattactaaatattcctaatcttcttcctctatggtacaaagttaataatcagacacaggcatccctttctagtttcttttattttcacctctctcatttcccaaaatctgacgagctttacattattgttcacttcttggaatgagaagaccactaatgtctaaccaacagagagcccagattttgggaatgaccaatttggagtcagggttacaaatataaaaacacctttgggttccatgttgcagttgcttatctttttcagtaagttggtgtttaacctttccttgatattgctgatatttatcaaatgagtaaaaatagttattttacaaataaacattcgtatttttacaaataaagtaaatacaaaattacaaaatacaaaaatacagaatattgcatgcttaggattggaaatatatattgctaagtagctactacctattacaaaatagtatttaccagtttgctgaatttgggaaataatgtgtttgtttctggctactgtgactacatctatgtgtcaatatgggtagtaaaagaaggaagagttctgattttgtggattgtataaggcaaaatccaaattcattttttttgatatgttgccaaaagcgggcaagcatgtttgttcatttgaaattagtcaatatcaatttgacatcacaaaataacacacttttaagggatcttatgaagaaacataaaaatccaacttaaattatccttaacctagcatattatcttttagtaattatattcatttccctctaaattccaagttcttcatccatctttttctccttatttctccatgtgcataggatacattacaaaggaaaaggaagcagacagcattgttttcacagcatataagtatcacactggatgttattccatgcatgcattacagagtgtcagtaaaactagagcagacatcactgatggtaataaagttccctgttgccccgtggggacccatgactttttactctgttccacagctgctcgggatgtgccatttccaatgggcaaaaggcttggctgtacatatgtcttgaaactatttaatagttggaaatttgcctgcagtgtagcttcagcagctttgctaagtttttttttttttttaagggagaaggaacactaccccaactgccaagtctggaaagaaaaaaaaaggtttaaatattattagaagcaaacttctatttagttgaaaactttgtgacacagttatattattgtttttaaaatataactgcacttgaccaaagttacatcaagtatataccataagtataccttatgaggtgttcttatgatgcgtttcagtgcgaagtttaatctatagacattattggtagaaatgaaataagtaaaatcaacattcattttcttgaaataggtattgttctccatgtgcacatgtgcatgtttctttatgatgatctataatcgttgctctctttatggcctcatgggtttctgtatttaacaaatagtgttgtcttaaacctagaggagcctgcctcagaaaaagtgatggcatttctgctgggacaagcagaagtggtcttttcccatgagattcatgtcagtgcaataataggcctgcatttctccaagggtgataagtgattttattgtcactttacccaacataggctcaaagtctttccattgtgtcaaaccttcgtgcttgttactttgcctgtttgtggcatgaaacacaagaggttaagtgatgaaacctgaaatttatctttctgaaatccaaatgttccatctttctctcctgaaagcaccacatgtgatcatcaataaaaggaactatttttccccaaggctgaaattgggtatacatgctaaatatttagcatattttacgttggtaatcacactaattgtatagcgtagaaggagctaatacagccttcctatttcagttatctctgaaaatgtgcttgctctctgcagtgtgtttctgcagataattgtgaagatcataaggagggagttggcatcaaacagaaagagaagtgagctgggggaaaatgcccagatttgagactcagaggaagggttaggagagcactggtcttgtggtgtgcctcccatcctctcacttgaagaggtagtaaatcaaactctgctcttgaagtagtgaatcaaactgtgatcctcaatttccccatctctaaaataagaacaataatgttaacatttaatagacaaaatgcagctgtatgtttgtaaaattagggataaacagtgctcatgtcgagtttcctaaacctaatggtttcacactttttgaaattctcccaactaggggagagcagtctgtggcccagggtccaaatttggcctgcaacctggttttgcaaataaagttttattggaacatagccacactcatttgtttacatattgtctgtggctgcttttgagctatgagggcagagttgagtgattgtaacggagaccatatggtccgcaaagcctaaaatctttactatctggccctttccagaaaaggcctatcaatgcctgcactagcctattgtaacagacacttttcccattaaaaggctttgaatttttacattctgtagggatattgtcccttattttgatggtggaatatatatgtagagtgtggcatgtagaggtgtgtattgttagaccttcaaccccgtttttctcctttcctttttgttctcacgctccttgttctgccatcaatgatgtgaatgaccttggacatatatctttacctctctgacccctaaaaccctccccagttaaaaaaaggtgaaataagttgtaaaattccttagggctttataataacgtatagagtttccctctctgactctctggctctcatcagccactgtctatttatgcatatgtacatctatatatgtgtgtgtgtgtgtgtgtgtgtgtgtatgtgtgtgtgtgtgtgtgtgtgtatatatatatataaatttcacatggaaatctccaactacatttcaaaattctaaaacaattaaaatatcatgcataatgaaagaaaacattctgtataattcagccgaatgaatacaccttgcttcataacgtagggaaccaattctcaaggcagagaatgacttagatatagaaacttgttaggactgagtaaaatgcttcagattagagaaactggattgaccctgtctcacctgaaccccatagtgaataaatggataaatgaatggctggtttacagaggagaatcacggcaacaaacaggtgatcgctgccactctcttttggttttgttttctttttgttcttgtttttttaagagccagaatctcactctgtcatccaggctggaatgcagtggtgcagtcgtacctcactgtagccttgaactcccagactaaagcagttctcctgcctcagcctcctgagtagctaggacaacaggcacacaacaccatgccccagctaatttaaaatttttttttctgtagagacagggtctttctctattgcctaggctggtcttgagctcctggcctcaaacaatcctcctgcctcagcttcccaaagcactaagattacagacgtgggtcaccatgtctgacctggttttacagttttatggtgattattttgggggagaaagagatgggagtaccttatcttggtaatggaagtttgccattttggtattgtaaattcaaaatgggccttccttttgagaaaaatgtaaagaaaatattattaattcatatcttttaatgcattgttttctcaaatgttgttttcataaattgtgttgtttcatgtttcataatgtttcataaaatagatgatgttattctagattattatgataacatctaagaaaaattttccagggcaggaaatgatgtaatgaataacataaactaaagaagatgatcaaattcagtgaccttcttaaatgttagagtttctttagaagaggagattattttgagcttttccttctgagcctagaatatctgcaatattcatgtgactacttattttcagcatatagacattcaggtgcattgccgagaacacgaacggctgttattttcacacattttaattcttctcttgccttgaagtgacgattcagttgtaaactaggttccctcccagaaaggttggtaactaccttttgtaggttaaggattgattcctacaccagaggaagaggtgttgctttaattattttatttcaaactgggaagaacactcctttgattttgcaattcactttaggatcttgtgatctagcaattctgattgacagagtttgaacctgaaactgaaatatcacattacaaatcaaagctaacgtttagaagcctgtccttcatttattcattcagcaattgcttactgagcacatactgtgtgctaggtgctcttctggactctggagatacagatgtgaaaaaacaagcaaacattcctcctctcagggagctttcattatcgtgagtagaagcagacagcaaacaaggtacctaataagtcagtttgtgtattagtcacggttctctagagggacagaactaataggatagatgtatatataaaggggagtttactaaggagtattgactcacacaatcccaagatgagttcccacaataggccatctgcaagctaaggagcaaggaagccagtccaagtccccaaaactccaaagtagggaagccgacagtgcagcccttcggtctgtgttcaaaggtctgagtcccaaagctgaagaacttggagtctgatgttcgagggcaggaagcatccagcacaggaggaagatgtaggccagaagactaaaccagtctaaaatttccacattcttctccctgcttttattctggctgcactggcagctgattggaatggtgcccacccagattgagggagggtctgccttttccagtccagtgactcaaatgttaatctccatggcagcaccctcacagacatacccaagatcaacactttgcatccttcaatccaatcaagttgacactcaatatttaccataacagttagtaataagggcttggagaataataaagcaaggcataatcatggtgactttttttttttttttttggtaaatggagcaaagcatatgtagctattttaaatagggtcaccacctgcagcaggaaaggagccagccgtggagacatcagggaaagcgtttaggcaaagggagaggaaaagcctcagtagcatcgcggttttcctctccaagaaacagcatgggaaccagtgtggctgggctgaggggtggaggtgataaaatgaaaggtgctctgggaggtaactgaggcacgggttgcaaggcattcaggagactcctgggtttttaccctaagtaaggagattctgtgcacaggagtgacatggtctggcagtatagaatcatcagactgctgtattcagaaaaacctctagggaggcagtggagagcccttggcacttggcccagggcattggaagtggtaaaaggcagttaaattcctgttacactttgaaggtagtgctaacacaatttgctcaagagatatgagtggaaaataaatgtatgacttcaagggttggggccagagcaactggaaagagcaattcccatgtactgagatgggggtgtcagtggtgggctgtgtgtggtaggatatgtgttggtggtgggctgtgcatagggatcatgatttttctttgggacacattagttttgaaatgcctctgagacctccaagtggagctactggaaggtattttttgagtattgatatttgaatgattggatctgcattcaggagcatagtctatgttaaagatatcaatttgaaagttatcagcacaaagatttttttaaaactgtgacacctgatgagatccctagagagtgagtgtagatgagaagagagaggcccctgaattcagatgcagaacactctcctgtctagagattatgagatgttaaggatcatggagcatggggctgaaaaatagcttctgttgaaactgaatgaaaatccagtagagaccaggcgtggtggctcacatctgtaatcccagcactttgggaggccaaggcgagtggatcacctgatgtcaggagttcaagaccagcctggcaaacatggtgaaaccccatctctacaaaaatacaaaaattagccaggcatgatggcaggtgcctgtaatgccagctacttgggaggccaaggtgggagaatctcttaaactaggcaggcgggcagaggttgcagcgagccaagatcacaccattgcactccagcctgggtgacagggtgagactctgtctcaaaaaaaaaaaaaaaaaaaaatccagtagagtagtgtcctgaacaccaaatgaagcctgcatttcttagagaaggaagtgatcagcagtgttgtgaatattgatgactgggggagtcctcacatggctctgccagacctccatattggggtgcttcccattccaataacgacaggaaaaatacatttcctccttacatatgtgatgttcagacctcataggagccacctgatgcagtacttttgacctgcaggtcatctacctcatattacctgtgtgtttcatataagatatacataatcctgggtcccacctgcactcagggaatcagcatatcccagtataagtcttggacattccagagattcctgatgttgattgagaatgacttgactcagaaataccatttgatccagcaatctcattactggttatatacccaaaggaatataaatcattctattataaagatgcatgcacacttgtgtacattgcagcactattcacaatagcaaagacatggaatgaacccaaatgcccatcaacagtagactggataaagaaaatgtggaacatatccaccatggaatactatgcagccatgaaaaggaacaagatcatgtcctttgcagggacatggatggagctggaagccattatcctcagcaaactaatgcaggaacagaaaacgaaagactgcatgctctcagttctaagtgggagccgaaggatgagaacacatggacacatggaggggagcaacacacaccagggcctgcttgggggaggtggggaggtagagcatcaggaagaacagctaaatggttgctgggcttaatacctaggtgatgggttgatttgtgcagcaaaccaccatggcacatatttacctctgtaacaagcctgcacatgtaccctggaactgaaaataaaagttaatttaaaaaaaaaatgacttgactagcagtatcacataatatgctttcaattagcctcttacctaaaaaatactatgaagctttcttattttagaaaataaaggaactaacctaactaaatgtccagacatgatatatcatagaggaaagcaagaaatttcaaaaaataagttatgtttccatcattccaaaaccacaaatgactgagaataaaaacaaggattttttttctccagtcttcttcatgtatatcaagttagatattacttttttgagcctccaacacagatggtgctataattagaattattgacagcatcttcccgtgatggcatcttgaaatgaaaccctctgtaaatcactggtggtgagcagcatctccacttgctcaatttgtaatagaaaatgaagtaaagaccctccagctttggtatatttaatcttcttcatatatgtattttcagtggagatttgtgaggtggtaattccagcacctcatctttctcttgacagctgagaaggtttttgttaataagacaaaccagaaatggtacaatcacaaaaatgaatgctatccataagtcatccagtgtgcaatgtggataaaaaatggtgcaggtttttatattttttttcttttctgatttccctttattgttcttaactgatgcaagaattgctagctacagggcacgaagatgaaaacaattgcttttatgagctgaatttctttttcttttcagagtgttaaaaggtgattctttgttgcttacctatttaatgtcaattcacccacattgaattgtactatattttactaaaatatgtcaatttcagcacagtaaaaatttggctgggttgccgtggtatggaaatgcctaaaacgatccttctgtattacaaatttggaccaaacaaatttatcttactgtttaatactctatcttttaatttgaggcttaacaaggagatcttacttaactgcttgttttcagctttgcctttcttttactttttttttttttttttgagacagtgtctcattctcttgcgcaggctggtatgcagtggtgctaatcgcggctcactgcagccttgacctcccgggttcaagcgctccttccgcctcagcttcctgagtagctgggaccacaggcatgcaccaccctgcccagctaattttttaaattttgtagagacagggtttcactatgttgcccaggctgtcctcaaactcctgagctcaagatatctgccagcctcagccttgcaaagtgctgggattgcagacatgagccaccatgcccctccacccccgttttcagcttttctatctataaaaagcaatgcttcacgtgttgaccatgtagtcattacatgtccaaagatgttagttttgtggagtcatatgatgtgtctttgtactgggatttcagatccatctgccccaccagcaccggctaacctccggctggccaactccaccgtcaacagtgatgggagtgtgaccgtcactatagtttgggatctccccgaggagccggacatccctgtgcatcattacaaggtcttttggagctggatggtcagcagtaagtctcttgtcccaacaaagaagaagcggagaaagactacggatggggtgagtgggaactggaggaaggattgttattcccacagagggtatttcaactcaaggcaactggcctgaaaagaggcctctgctaaactgagagatgccatggatgcaggaaagcttccctcccattcatttctaccgaggaagttcacagaatgcaggggcatgccggctgttttgccttttatattttaggcagaagcatttgcatttagaccattgacctactcctatctaaatgtcagtcagaactctggaaatcaaaggaacagtttaaatgatccccatcttacctgtctggccatagaaaatgatattatgcaaaatgtactttacttttaagttttttttttttttttttgagagagagagatccttgtaaatggaagagtggatgttcatggcttttctgttgcgaagtgtttccgtctgtaatctaatcactgagcagtaacagcttaggaaggccacgtctcacaatatgttcttctcattgattaaaaggatctggagtggtttatccgtcagatgccaagaaataaaatcttcattgaaccattttctgcaatgagattcttatgataacaagcatcttgtattatttgaaatgcttactgcataaaaatagttatttggattccttttagtatacattcctttatcttgtcataaaatttacataaataccttttcctatcacttataaagttgaattccataaataaatgtttagaaatgaaaagatagcaaggctaaagatttcaatatctgtgctcttcagaattataaaacatgcctcaaaaagttggtatcattgatatttagccattatactattttaactttatttatttatttttgagagggagtctcgctctgtctctcagactggagtgcagtggagcaatctcggctcactgcaagctccgcctcccgggttcacgccattctcctgcctcagcctcccgagtagctgggactacaggcgcccgccaccacacccagctaattttttgtatttttagtagagacagggtttcaccatgttagccaggatgatctctatctcctgacctcgtgatccgcccaccttggcctcccaaagtgctgggattacaggcgtgagccaccacgcccagccccactttatttttatgaaattttatgacagttccattttttatattgaaggattttgctacaaatgataatggtagtgcacacttattgcatgagctggaagagctgaaattggggaatcacttaggaatctagagcaaaaagtgacatgatgaaatgctgacaggtcccaccctccagccccctgcccaatacattatgacagaaaataatgaagcaccttgaagcattttgtcaagttaatttttcttttgtatagcttttggtggaaatttgctcctagaaaatttagaacagatatcaaagaattgcaattagtgccaattcataatttttccatgtatgtggcaacatagatctctgttactttattataaacagctccctttccttcgagaggtggtgtctcagagtggcgagggctcagaatgatttatttccatggtatctgagaccaataattggtttagaaacagtatttcaaaatacatttggcctttctatgaagtttatttttattttttatttcattatattttttgagacagggtctcactctgttgcccaggctggagtgcagtggtgcgatcacagctcactgcagccacaacctcctgggttcaatcttctcacctcagcctcctgagtagctggaactacaagtgcacaccaccatgcccaattaattttttttgtagagacagtcttgctatgttgcccaggtagtctcaaactcctgggctcaagcgatcctcccacctcgggctcccaaagtgctgggattgcagtcaggagccaccgcacctggcctgaagtttattttgatcagtagtaaaactgaattttcagatcccaaagatatagaaaagttggtaaaagaaatcagaagttggcatgcttcataatgacacacgagattttgcaatgaagatgagagacgtggaaggtttgtaacgcattttgggtatattctcttaatttctagtttcaaaattctgtgatcctggagaaactccagccagactgtgactatgttgtggaattgcaagccataacgtactggggacagacacggctgaagagtgcaaaggtgtcccttcacttcacatcgacacatgcaaccaacaacagtaagtgactgtgtcatgtttttcaagatgattgtgacatgatgggcgccatatcacaacaaggcacaatggagggagagtgagtttttgatttggaataattatatggcaaatcttcttacccacatgcatgtgactaaagtatttaaactacgacatacgaaacagtttgacttttgaattctttcttatggtttttatctattgtaggtgcaattttggtgttgtaatggaaatttaagaaaacttattgtgtctcattttaacagattgactgtttttatgtttacatgacgtgcacatatgcattctgcatacttgtttttcaggagattacgtacagttaaactgttataacttgatgttatttctgcttccactgtttctgtaattgttgttgttgttgttttgttttgttttgttttgtttggtatttttgagacagagtctagctctgtcacccaggctggagtgcaatggcgtgatctcagctcactgcaacctttgcctcccgggttcaagcggttctcctgcctcagtctcctgagtagctgggattacaggcgtgcaccaccatgcctggctaatttctgtatttttagtagagacagggtttcaccatgttggccaggctggcctcgagctcctgacctcaggtggtccacctgcctcggcctcccaaagtgctgggattacagtgtttctctagttctgtatacaatacacttatttttgtgcaattgttttacatatttatctcccaaatcaaagttgggcacttttgaaggcagagaccaaaataaatcatagtactgagaataatgtgtttgtatgtacgcgagtggatagggggcacaaaaagtggtgtggcatgcctgtttttcctagtactacacagtggtcataattactgcttgaaaggttacttaatactccattgagtgaagttactaaatcattctcatattgcttttccttgtttctttttttcttacctagtatgttagtatgtttgctgggaactgagcaaaacaatagaagagtctttcttatatgacactcatatcttagagaataagttacttgatgtttctggctttgttcaaacgtcgataccggttagaactgccatgcaggggctcctagcaaggtttcaggaaactgggacaaattaaatgagagtaggagggaggaggcgtttgtcgcaggggctcctccgatgttgattttttaggctagcaggaccccgtcatcatagctgcctttgatcaggacagtgggccttgttcagaaggagaagaagaatgtgttaaacatttgtctgaatttaggaaaggcaatgctggtcctgcagagtgagacacaggggttgctcataattaccttccacccctgggaaaacgtaggatccaaatgggcaggtttgtttgaaataatgcttcaaaaaatggtccagaaacagagatttctatctgtttgagaaatagtctctttggagattaaatggacttgaaatggtcaatttttatgtgagtctcggtacaatataaattttacctaaaagttctcatggaaatatgtttagtaacctcattcatttttaatccattcatccatctacccatcgcattgaaattgtgtgcctatgaattatgacatcactgtgtctaatgccaggaatactatattatatatacactatatactgtaatacactatatacactatatatacgtactgtatagcaatatgttccataattttctataaatagtatgcacataggtatatatgtacacatatgcatacatatacacatgtgtctacaaatatacacaaacacgcacataactatacacacatacatactcatacacacacacacacacacatatatacacacacatacattattcctagcacgatgatgtattttggtttctgccttaaaagtgcctaattttgaatttgggagataaatatgtaaaataataacaaagatctgtgtgttgcatacagacagaactacaggaaacagtggaagcagaaatgaccaacatggagttggggaatgagagtcacatcatccctcatgaagtcctgaagagtgagcgatctgcaggcccacaaggaatggacatcattccacacaaacgcagcagcgtggatgagtgtagagagttagagaagcgcattgcatgggcagagaactcagcgtgaggaaagaatgaaggtggatgggccactggtctctcccctggaggtctcattgagttgcaaggatttaaccaccatctgtgtgctaatgactccctgccctcccaccctgaccactctttgaactccagagtcctgcattcagccacccacttagcacctccccttggatggcttgcagatatttcaaataaaacgttcaaacacaagctctggattttcgcccatacctgttcctctcctgggctcgcctatctcagtaaatggcaccaacattcacccttttgctcaagccaaacatgcagaagtcattcttcatttttctctgttttttctctccagaaattcaattcttcagaaagtccttttgtctctaattttaaattccatatggaatctgtccagttctttcgcttgttcacgctattgtcttttctttcctataaattgaaatagtctcctaattagtattatgtttctgctctttcttaaatatctattctttgtaaagagcagtcaaagttttctttagaaaatatcagcgtagttacagatctctctctttttggagttccactctcaagacagctacctagttatcttcaattctctctttccccaaaacttcatccttcactatattcttctatattccttaccaacccccttctcaggccaaaatcctttaaacttcagcttcatgcaagagctgtctttctctactggtggtggagatttcatctattgtataaaataagcatgtcttttagtctcctggttcttccaataaacaacattctttccccattagaaactggtatgggattgcaaattcccataatttaatatctgttaatttccagaaccaaaagcaaggagaaaaaaagtccgacttcaacttgtccttgttgaggttacattatctagagccttgtcatggtccagcccacagacaaaacttttatggaaccctggatctctgtagcatatccacagcttcttcacccttcctggggcatccccacacaaccctgtaactcagggagatattctttaattagcttcttctgctaccctctcaagtatgattataaacctttttctctcctttgagccacattgcacatggagtgcacagtccctaaatcccttcctctcagtaagccatgcggttccccataaatataaacatatctattacatggagtacacagtctagtctaaatcccttcctctcagtaagccatgcggttccccataaatataaacatatctattcttatgtccatgtttatcttctcctgtcttctgtattctaaggtggaggcacccttccttctgcatgtggtggacttcaccatgcagtttctagacccattcctccccaactcagatacctgcatccactgaagtcaaatctcatctacatcagagaccatggattatctacatatgtggtcacagtatccgtcataatccctggcatataaacacggcaacaaaaatatttttgaaaccaagttaattagttattccctcatttgcctacaacctcagcctattcctctccactggcttgatctgctcagcttccagttctaaagcaaacctttcattgatgctggtttcattctagctaccatcttatctttctcctttccacattttttctcaagtttctgcaatctatttttcaatctcacttttccaccaaatctgcccctgctaatttctaagtctgatggatgttttccattgtaattttattgaccatttctgatgagtttgtccttgtttaactacactttccccattgttacatcttgacccttgtatgtttgactcccagatgtcttaatttttctcatacctcagtttccttgtaggatctcctgcctccatccggctcttggacattggagctctccagggttctaccttatctgctctgacaacttagtcactacctactcatggtccattctcaatgactcagctccagccttgatttctccactaataccagatgtctgtagcctgtcattccctgtatctgaatgtcacacaggcatctcaacctcaacatactccacattgaactcactccctccacttacaaagctcgatgttctcatgtatctctggtctccattgaggttactactgaccagaaacttgggagacttccttttaccactttctgttcacttcagtttgtttctaggtcctgcaattatttcaggacccacaggtttcttgaattttccaggaacatagtaagagctcagtaaattgactgcaactcagctgaatgcaactgtctttccattcaaccagctctgtgccacactctaacacgacagctttcttaagctttcatctgctacggtcataaatactaaaggggaagagagaaagaaatggcttttggtgtcatcttggaacaaccaaggttggacatcttttacaagccatttgcatattttaactgtgtcctccaagagtttgtgttttcacttggttgactattccaaaggaattatctttaccagtgagagtttttagccaggtggggagacactagaattatggcagttaaatgaacaaaacaggcagttaaatgaaagaaatctatttgaccggttgattccctgtgttaaggtcctttgctaattatcttttaaaactaggtaatactttagctgaccaattaaaagatagggtagttaattaagagatatggtagttaacctatcaaagaccactttattctcaggactgattcctcttacatagattagaaaaggaataaaagaaaagtaagaaaaaagaagtcatagtgcaaagtacctatagtaacacacattgtttgggtctcaggtgattccacagaagagattgacttttcaacggattatgtaggatacagttgaatgtttgtcaggattttatatcccagtgttgatatataatctcataaacactagtctgtgacttttataagaacattatatatttcatcatgaaccaactagaagtaaagaataattacaacgttacagtataagcaagggaaattacattttataggaaggagagtagtaaatgtcactatataaattactttttgaattatatttttccaggtctgcaggctgctaggtgttttaatgataaacatttctattcaagtgaaggctgaatgttcatgcagttttatgaaacaatcccttgaaggaagtatgatataacattgtctttaatggaaaggtagcttgcttctttgaaggcaggaggaatattttcaagtttgacaggttccaaatgttttatagttgcctcatggaactggaattattttctggctctccagaacaagaatagatgggagagaaaatactctgaatctcttgatgatctataaaattaatcaaaacttggatctttgaaaaatagtgtacatattttattttcttaatttctatgactatcgagtgtaaatcagacatcataactttttcagaatattgtagatatgatattccatttttgcttattactgaaagtggaggagacattcttataaagtcagggtcatactgctagcattgtagtatgcaccttatctgttttttacccatggcgtgtgtcagcaacactaattgttggtggatttctcttcttgaatcattttaataaagcaacaatggttcaatcttaagatatataaaaatatgtttttacatctataattaaatactaaagtttgcctagggctgggcgcggtagctcacgcctgtaatcccagcactttgggaggccaagatgggcagatcacttgaggtcaggagttcaagaccagcctggccaacatggtaaaaccccatctctactaaaaatacaaaaattagccggccatggtgatgcgtgcctgtagtcccagctactcaggaggctgaggcacgagaatggcttgaacccgggaggcggaggttgcagtgagccgagatcatgccagtgcactccactacagcttgggcgacagagtgagactctgtttaaaaaacaaaaaaaagaaagaaagaaagaaaaagtttgcctaggatataaagcaagtaggaagacaagattgacattgagcttaaacctagtatctaaacacagtatctatctaaactgattatctgtcctagttatctgctggtgagttctcaatattatcacagattattagaaacataaatgggtttgtgaaactcttagatcctggctgggcacagtagctcatgcctataatcccagcaatttgggaggtcaaggtgggaggattgcttgaggccaggagttggaaaccagcctgggcaacatagtgagactgtgtctcttaaaaaaaattagccggctgggcgcggtggctcacgcctgtaatcccagcactttgggaggccgagtcgggtggatcacaaggtcaggagatcgagaccatcctggctaacatggtgaaaccccatctctactaaaaatacaaaaaaaaaaaaaaaaaaaaaattagccgggcatggtggtgagcgcctgtagtcccagctactctggaggctgaggcaggagaatggcatgaactcgggaggcagagcttgcagtgagccgagatcgcaccactgcactcgagcctgggtgacaaagcgagactccgtctcaaaaaaaattaaaataaaataaaataaaataaatgattctcagttatccacacattgatttgaactctttaagctaaaatagcctaaatgcgaatctaacaaatgtgcgtttttattttcctttcatctggtccgttggatagacaattcattgggcatgccagtgtcaggaaaaattgagttgatgtagattatcttctggggtccacagctttccttgactgatcttgtcttaccgcaggttgggcatgttctctccatctcatctttctgtcttcctctcacctgcccaagaatgcaaacctcactgcttttattagaagagtttcgataacacattgtttataggcataaaatcaacacagcttacccttttatctctcagagggctatttgaaattcagaaagcagaaaagtcttgcatcaaagggcagaatttctatgtatgcaacctctaaattcagtgagtggatgagggagaaatttggggcctaaggaaatttttggtgtcttaattattaaaccatataaatgggtgctctgtaagactcagtacatggtgatggaaacagaagtttggcatgggatggccctgggattaaatttcaccttcactctttgaattatgtgaaactggatacaattcttagtatttttgagcgctggttttttcgtcttcagtgtataccaattcctctttctcaggggtctgcaaactatggcccacaggccaaatccagccccctcctggttttgtaaataagactttattggcacagggtcacatttgcttacatgtcatttatatatcatgtccggctgtttggggggtacaacagtaattgagtagttgggagagagaccagtctgcaaaaccaaaatcatttaccatatgatgcacagaaccaaaaatatttactatctggccatttaagaaaagtttagtttactgacccctgcttaatttcataggatggctctatgaatataaattagtgtcaaaattcaccaccccaaccaagccccccaggaacacacctggagtcaaaagtgaggtttagtggcatgtacctatactgctaactacttagggggctcaggtgggaggatcacttgagccagaagtttgagaccaatctgggcaatggtgggaaaccctgtttccaaagaaaaacaaatattaggtttattgccctttctgcaacatgtttgaatctcatgttaaaggattactgtattgacgtaaataaaacaccccgaatagccccaggcaaatgagcatttggtaatatatttggtataaacagccatcaattcataattttatttatttcatttcatccaatacatattaggcagctaccatgtgcgtgtttctgagctaggcagttgccatccaaggaagattaggatgagctctgttttgtagaggacttctgggttgagtttgaggaacaaattaaagaagaaaaaaattacttaaaactgaaaaaatacaggaacacaaaagagtggtgtgttttgattcactctggaaaatcttcaccagggagagcctctgagaagttttcatgggcaaagaaggttgacagaaacaagtagtgctggtccattctgagctaaagcaatcagaattatagatacaaagaaaaccagcaggtttggggaattaggaatggcacaagagagaaagatacagctaaattaaaacaaaataataaaaagcaaactaaaactggagtcagatcatgactctacacaacaacacagtaagaaatgacctaggctaagaatgaaatcttgaactacctgattcaaagatatatttaatggtgttttgatttatagtagcatatctctatcttccactggatatgggatacgtagggcttggaatccttcttgttcagttttgtggtgtcctacgttgcaacgaatatgtgttgaatacacttttaatggacaatagggaaaaaaaagttcatgcttttaataatgaacatgtgaacatactctcgcctcatctttcatgaagtgtcctggtttcttcacaaaataccacgtcacatggcaccagttatattcccatggctccattcctcagaaaacttgtggccactttttcgaagaacagaaacagtggctggtcagactgatgctcttctactgggcagatgcctttggtcaagctcactgccggtgcaccatcattagagcagatttgcctggtggtatttcaggagtccctcaggtacaaaaactttatctctgcaactcctagctcaatgcctggctcttgggaagtgctcagaattgctgacagaaagagctaattactgccagaaagagctaattactgaatgggttcttgtattccattacccaacctgatgtactgttgcctttgcatttcatttcatttactggatattttaaagtttcatttcaatgtctgtcagaatttggatgtctgtcactaatctgaatggcacacagattggttgctgagtgatgaagctgaagttggcattgtcaactgagtaggtgcaatttgctccttactatttatttgacaaagctgaaccgtatttccgtttagagccctgcaccaagtattgatgtataatgctcatacttccacattacgtataggttttccacgaaaacctatctacttttttcacgaaatggtattgtaatattattttattttcctcataactataaaaaatctataatgagaaatattattcatacttattatttacattggagcatctttcaagcctggtgaatatatgttacttaccaaattaaatactggggattatatgtaatatacttttagtattccagtggattttgaagggggggttcattaacttgaacatgaaagaacatgcggttacaccaccttttacttaaaaaaaaaacagacagttaatatgactaaataacaggatgaaatgaagtacactgggactaatatcaggttatataataatgaagttgtgggatacatgtgcagaacatgcaggtttgttaacataggtatacatgtgccatggtggtgtgctgcacccatcaactcgtcatctacattaggtatttctcctaacactgtccctccccttgccccccacccccaacaggccctggtgtgtgatgttcccctccctgtgctcatgtgttctcattgttcaactcccacttatgagtgagaacattcggtgtttagttttctgttcctgcgttagtttgctgagaattgtggtttccagcttcatccatgtccctgcaaaagacatgaactcattcctttatatggctacatagtattccatggtgtgtatgccacattttctttatccagtctatcattgatgggaatttgggttggcaccaagtctttgctattgtgaatagtgctgcaataaacatatgtgtgcatgtgttttatagtagaatgatttaaaatcctttgggtatacatccaataatgagattgctgggtcaaatggtatttctagttctagatccttgaggaattgccacactgtcttccacaatggttgaactaatttacactcccaccaacagtgcaaaagccttcctatttctccatatcctctccagcatctgttgtttcctgacttttgaatgatcgccattctaactggcatgagatggtatctaattgtggttttgatttgcatttctctaatgaccagtgatggtgagctttttttcatacgtttattggccgcataaatgtcttcttttgagaagtgtctgttcatatcctttgcccactttttgatggagttgtttgtttttttcttgtaaatttatttgtttcctgtagattctggatattattagccctttgacagatggatagattgcaaaaattttctcccattctgtagttgcctgttcactctgatgctagtttcttttgctgtgcagaagctctttagtttaattagatcccatttgtcaactttggcttttgttgcaattgcttttggtgttttagtcatgaagtctttgcccatgcctatgtcctgaatggtattgcctaggttttcttctagtgtttttatggttttaggtctaacatttaaatctttaatccatcttgagttaagttttgtataaggtgaaaggaagggacccagtttcagttttctgcatatggctagtcagttttcccagcaccgtttattaaatagggaatcctttccttattgcttttgtcaggtttgtcaaagatcagatggttgtagatgtgtggtgttatttctgaggcctctgttctgttccattggtctatatatctgttttgttaccagtaccatgctgtgttggttactgtagccttgtagtgtagtttgaaatcaggtagcatgatgcctccagctttgttctttttgcttaggattgtcttggctatatggactcttttttggttccatataaaatttaaagtagttttttctaattctgtaaagaaagtcaatggtagcttgatgggaatagcattgaatctataaattactttgggtagtatgtccattttcacgatattgattcttcctatccatgtgcatggaatgtttttccatttgtttgtgtcctctcttatttccttgagcagtggtttgtagttctccttgaagaggtccttcacagcccttgtaagttggattcctaggtattttattgtctttgtagcaactgtgaatgggagttcactcatgatttggctctctgtctgttattggtgtataggaatgcttgtgatttttgcacattgattttgtatcctgagactttgctgaagttgcttatcagcttaaggagattttgggctgagatgatagggttttctaaatatacaatcatgtcatctgcaaacagagacaatttgacttcctctcttcctatttgaatacctttatttctttctcttgcctgattgccctggccagaacttccaatactatgttgaataggagtggtgagagagggcatccttgtcttgtgccagttttcaaagggaatgcttctggcttttccccattcagtatgatattggctgtgggtttgtcatcaatagctcttattattttgagatacgttccatcaatacctagtttattgagagtttttaggcatgaagcggtgctgaattttattgaaggccttttctgcatctattgagataatcatgtgttttttgtcattggttctgtttatgtgatggattgtgtatgttgaaccagccttgcatcccagggatgaagccaacttgatcgtgatggataaactttctgatgtgctgctggattcggtttgccagtattttattgaggattttcacatcaatgttcatcagggatatcggcctgaaattttctttttttgttgtatctctgccaggttttggtatcagcatgatgctgacctcataaaatgagttagggaggagtccctctttttctattgtttggaatagttttagaaggaatgataccagctcctgtttgtatctctggtacaattcagctgtgaatctgtctggtcctgggctttttttggttggtaggctattattcagagattcaacttcttcctggtttagtcttgggagggtgtatgtgtccaggagtttatccatttcttctagattttctagtttatttgcatagaggtgtttgtagtattctctgatggtagtttgtacttctgtgggatcattagtgatatcccctttatcatttaatattgtgtctatttgattcttctctcttttcttctttattagtctggctagtagtctatctgttttgttaatgttttcaaaaaaccagcttctggattcattgatttttggaagggttttttgtgtctctatctccttcagttctcctctgatcttagttatttcttgtcttctgctggcttttgaatttgtttgctcttgcttctccagttcttttaattgtgatgttagggtgtcgattttagatcttccccgctttctcctgtgggcatttcgtgctataaatttccctctaaacgctgctttagctgtgtcccagtgattctggtacattgtgtctttgttctcattggtttcaaaaaacttatttatttctgcctgaatttcattatttacccagtagtcattcaggagcatattgttcagtttccatgtagttgtatggttttgagtggctttcttaatcctgagttctaatttgattgcactgtggtctgagagactgtttgttatgatttccattcttttgcatttgctgaggaatattttacttccaattacatggtcaattttagaataagtgctatatggtgctgagaagaatgtatattctgttgatttgtggtggagagttctgtagatgtctattaggtgcacttggtccagagctgagttcaagtcctgaatgttcttgttaattttctgtctcattgatctgtctaatattgacaatggagtgttaaaacctcccactattattgtgtgggagtctaagtgtctttgtaggtctctaagaacacgctttatgaatcgggatgctcctgtattggtggcatatatatttattttagctcttcttgttgcattgaaccctttaccattatatattccccttctttgtctcttttgatctttgttgggcgacagagcgagactccatctaaaacaacaacaacaacaaaaaaaaaaaaaaaaaaaaaaaaaaaactcctgtagccagctctgtgtctgcccaaatggcctcccagttttgcacttgaaactcaggggcctggcggtgtaggcacccgagggaatctcctggtctgccaattgcgaagacagtgggaaaagcgtagttatctgtgctggatagcactgtccctcactcacggcttcccttggctaggggagggagttctccaaccacttgtgcttcctgggtgaggcaacgccccaccctgcttctgctcgccctccatgggctgcacccactgtctaaccagtcctaatgagatgagccggtacctccgttggaaatagagaaatcacccgccttctgtgttgttctcgctggaagctgcataatggagctgttcctatttggccatcttgcccaggaatctataattacttttaacaagtaacttagaatgttgtactttgttgtagaagaacagcttgtgaaaactagaaaaggtggaattcaaacacaactcccttttcaaagacgacgacccactcgcccgctggaagtcggagctcccttctatcaggatggccaactgcaagttaaagtctactggaagaagacagaaggtacataaacattacttacttatttcttacttgctttaaacagcacagtaatatagagatagttttgaagaagtaaatgtcaagccacagtatcaatactaaggcaaacggttgttgaacacaagtctgaatgagttgacggttatctcacatcttgaaatctacaacagtcaattgcttaaatattttcctttcagggatattagcttgtcttcatttctttcccagagggctgattggctgatgttatatccaaaacactcaaaatattcattattttgagctgtaatttttgttataaattattaattattattttttaaagatccataatacaaataatttagaaagtagggggggaaagtcacctattatctcaatatcatttcctgaaacagcactttggtgggtttcctttcagaaattttctatgcatctgtctttcactcagttagggtgtgtgtgtgtgagtgtgtttttaaaacatacacacatatttctgtgtaacattgtttgagctgctatattgtcatgcatttttcataacattctataaatgctactttgtatgggtatatcttaatatcataatacatgtcattattccagtacaatgaaacatttcagttctttagaatttctgttttctaattaaggctgcaatacatttatccttaggatagattcatttcatttgtttgaacatttatctttagcataaattctttttgtttatttttttttttagtcttagaatatttgtttttctgttatcaaggtggtacttttagaatttattcaacatacagtcttttatctttatcactcttatgcctcttaaaaacataagcagaatagattgtttcaagagttaggtttttaaaattctcctcactcctctgaaattcacttttactcaaggtattgatgggccatgtgccataagcaatattggtgttggagtggttcctattccaggattttctttcaagctgctgaaatccattctgcaagtaaaataatattattattaatattaacatattttatttctataatgttaattaaagtttattcaacatttattgcattaagattatattatgtctatattacagttaataattttataaatattaaataagaaaagtatttgatctattatattgattaattaaaatatcaacatattcatatttaaaaaataacattttattaatattaaaattttaaacataatgtaataaaatgaaaatgtaaacatctactattgaaaaagtaaatatctcaagcatacaagagtaaccaccaccatcctgacttttaaaactcaatatttgttttgcctgtatttgaaatttatcagaatggaatcactcaatttctatttgtatttggcttcttgccatgagcattttatgagaaaccaatgcattctgttgcatgaaacaattcattcatttatattgctgcctggatgtccttagtatacatcaatctgtgtatcctttcagctgtggatggagatttacttattcagatgtggagctattaagaatagtaccagtgtgaatgccccacgaacacatgttgtttgacgcatattcttccatagaggtgggattcttaggccgtagagtatgtcaagctttagaaaacattaatagttttccaaaatggttgtaccaatttacattctcaccagtagggcatgattatggttccaggtgctccacattctctctgtcatgtggtattttccatctttgtaagtttaccctttctggtatgttcatagtgatacctcattgttatttgaattcgcatttttctgatgtccaagaagttgagcacctttttgtaattttactgacaattggatttctcttttttgaaggactctttcaactctttagctactctgtcctgcatgagtgcttttaatatagtatatacaagtcatttggtgtttgtttgttgagacacagtcttgatctgtcgcccagtctggggtgcagtggcacgatctcagctcactgcaacctccgcctcccaggttcaagcgattctcccgcctcagcctcctgaatagctgggattataggcgtgtgccaccatgcccagctaatttttgtatttttagtagatatggggtttcaccatgttggccaggctggtcttgaactcctgatctcaagtgatctgcctgccttggcctcccaaagtgctaggattataggcgtgagccactgtatccagccatcatttgttttcatgtaagtattttcttccactctgatccactcttgcatttttaactttcttcttagtgggtttttttttttttgatggagtttcactcttgttgcccaggctggtccgcatcctgggttcaagcgattctcctatcttagcctccagagtagctgcgattaaaggtggctgccgccatgcccggctaattttttgtattttcagtagagacagggtttcaccatgttgaccaggctggtcttgaactcctgacctcaggtgatctccctgcctcagcctcccaaaatgctgggattacaggcgcactgctcccagcccttagtggttcttaattttagagataagcaattcatcattttgtttcctttaggtttagtattctctatgtcctggttaggaaatcctttttcatacaaaggtcacaaagatattctcctttcttgtcttcttgtccactgtttcatcttttgtattagtccactttcatactgctatgaatacctgagactgggtaatttataaggaaaaagaggtttaatggacacacagttccacatggctggggagacctcacaatcattgcggaaggtgaaggaggagcaaaggcataccttacgtggtggtaggcaaaagagcatgtccaggagaactgcaatttataaaaccatcagatctcatgagacttactcactatcatgagaacaacatgggaaaacctcgtccccatgattcagttacctcccaccaggttcctcccatgacatgtggggattatgggagctacaattcaagatgagatttgggtggggacatagccaaatcatatcaccttttattcttaagctcttttacccagaattgatttttgttgtagagggtcagtgttcttttttttttttccttctgatctccttctctgatacatcatgatatattttttaaatgactattttccccaaagctctacagtgcctcatttgccctaaataatgcatatatgtgcaagttaatttttggactttctatagagtctttgacatatttttgcaatgttgtgacaataccttactgtcttaactactatagatttataaatatttctaatgatagtcctctagtttttatttctttatcaaattgtctcaactattcctggccttttgcatttttatatacatatttgaattaatttttcgatttccacaaaaacttcctgagatatttatggagattgaattcatccacgtgtcaatgattttgaagaattcgcatcttaaaaatactgagtgttccaatctacaaacatggtatgccactgtattcaggtttaaaatttttgtctcaacaatgttttataatatattggatagaaagtatgatactttttaatatgatttttccaaggtatttgtgtttatttttatcctattatagatggcatactttttcctcaattatactttctgatttttgttgttggtatattataaatatattttatattcatatattgactgtgaatccagcaatattgttttagcactttgttaattataacattttctctgatgatttgtttgcattttttctacaaaaaccatcatctagtttgtaaataatgagaattttatattttcctttccatatctttgatgttttagttttcccttgccttaaaactggctgagagtttcagtacaatggtgactaaaagtgatactattaggcatgatgtttaagtgtaaggtttttgaagacatccctggtcagattaatacaatcccctactcttcttacttgcaaagtttttgttgttaatggatactggtttttatcaaatattcttacttcatctagtgaaatgatcatacatttttcttctttgttctattaacatgatgaactagaggaaacattatagatcacctcctaggtctgttgtgtggaataaatgagattacacatccagattggttggaccggtgcctggcacaaaggagacaccttaggtgtttcagtgtgaggattcttacggcactgcttatagtgcagagagaggacaggatgtcaggacagacgtaaagagcctctgagcccagccttttaaggcttggtgttgctttaggactgactctcaatgttttctcctttgtgaacaacaaagagcagtgctttaagacatgatttaattgtccaatttgcaatacaagtgctacaaaacttaggcatcttattaaatttggcagaagaaaagagattcaccttcactgcactgtatcagcaagcagtaatatgaccaatattcccatacaataatgatttcagtgcatgacaaataggaaacatggttgttggcatagatatgtacacatatacacacatgtacacatatatacacacgtattactttgaataactcaaagttagaaataaatgtgaagaatatcagtggttttctcaaatactgaaatctttaaagaaaccataagcagagaattgtctcaatatttattaatcaatattagagtccatagtattatccagtttacgatgcatgaaattgtggacttgatgataaagggacaagatccaaaggcaaggagtgaccttgatttgggttccaaaagtgatgctgacttgattgatgtttagtgacttggaccctgggccacaaaggagaagctgggagtgatgagctcatgtgacggaggtaaactagcctctatttgtcagtaatgatttgtttcactaatggaaatgcctcgcagtcagttagtgttcaaactgttttcttcatacccatttccagcctctgaaatgagttaacctccaggaatgctacctactacagaccaacattaagccatcatctaataagtacatatccatgctggccagagaacactctttgtggctggccaaaaccttgattccaaagatataactgatttcaaatatatttctaaaagagaatgttctgtgcagtggccttcaacagttgacagtgtagcctccagtcaaaactattgtggttacagtgttactgcttactcaagagacagagattcattctacatctttagtgacatgtcaggatttgttctgtggatttttttgtagaccatgcatctgctccttgccatttcaactcatgccctctctatatattcacgctaaaactttctttgaagtgacaggaagttcttgaaaacacttggtatggattcccttcaaaagaatggcaaaaatatggaatttggcattttgcttttaccttgtttaggaagatcctcccaaacagtttggaatctaaaaagaacattgtgtaaaaatatctagacagaatacttatgactctactgagtacgctaagccctttaccaaaataatagggtgtaaaaacaaatagagcttaattttcctacacaaatcctgtgtctgacagctggtggcagaatcttttcattttcaattaaagtgacaaaggaaatatagaaaaaaaagaacgggaagaaaggtctggttgttcttttaagttaatcctttagatatatagtaaacattgcaaacagtaataagagtctttagatgagtattttaatacatccaaaaatggtatgttcaactttcatttgaaaatgtgaagttttaaaactttgaattggccaggcgcggtggctcacgcctgtaatcccagcactttgggaggccaaggcgggcggatcatgaggttaggaatttgagaccagtctggccaatatggtgaaaccccgtctctactaaaaatacaaaaattagccgggcatgggggtgcatgcctgtagtcccagctacttgggagaccgaggcaggagattcgcttgaacccgggaggcagaggttgcagtgagccgagaccgcgccactgactccagcctgggtgacagagcgagacaccgtcaaaaaaaaacacctttgaattaacttagatatcaatgaatgcatttccattcactttttgtcttcttttgcaaatggacacaaattaccgactttatgccaggctgtgtgccacgtgatgggaatacaataacggataagagagatttcctacctttaaggaacctgcagttctgaggcttaggcagttaggcagttgccacataataagacattattcttcatagcagtctggataaacagctgaagtagttgagagcagagagattttgacgttgtgtgcagaggaattttcacagaggaggtaaagtttaaggtacattttaaaggctggattactttttttggccagggaagatgaacacttctggcccaggacatgaagaggtgcagctgggagaaagatcgggaatgtcaagtattggtgagattgaggaagtgactgtgtgaggctggagagacagatcaatgtcaagtgatggagaagcttatatggtatgccaggaagcttggattttgttctacatggaggagagggatgtgaagtagcaggggaaattctgagcaggacttagagatgttagcaaaagcaagtgtgcaaggaatatggattggaaaagttcagagagagcacgtcggttaatttcagtagccaagacaagaaataatcagatcatgaattagagacagcagtaggaggaggaaggttggcgagttatgtaagagtattacacaagtgaccacataatttattgtctgaactgggatttatttgagaataaaaggaggcatttgtaaacattattccccaccaacagacatagactgtaactctcccaggaaagccaggatgtatggccacttggatattaagacctgcctgaagagaaaaagagaaatggatctaaatggagtgtttatcttctagcttgaatgactaacagtacttcgactaacaaagattgtgagcagtagaattatgatatgtttcatgggatatgtctccatgatatggagaatttggttttggtgtgtcgaatttgagataactacatgattgccagaaaatgtcataggcagtcagaaatacatacttgtagctcaggaggcagctctgtgatagcatcgtggatttgactggagctatggtcaatccactgactatactgtcaggggatctgcaaatgttagttgatttccactggatcacacacacacttactattaggagctgagaacagctcatgctctaattagagtttcgtattttccaaaaagtcctttttcttaaattttatccattcccacttcccttgttattttaaatctgaaagccaaatgaacatataaattgtagcagagctcatgatgttgaacacatgatagaagggagtggtagaaagctttgggaagtccaaagaacaatgaagaggaaagtatgtgtttcaaacttattccacatttttcctccttacagaaaccttttatgtactcaccacatgatctacagaatcccaaaccaaagtttccccagacattcataaaacatgctcttattcataattatcacacatgtaggaaaggagacctttgaaatggactcagtattactagcataggagcactgtacggaatgtgaatatcagcacagtttctgtcatgggaaaggacactttggctggattttctggatttttttgactttgtaaaatgagaaattatctcctctgtatgaaactcaatagacccatctaaagtggtttcaaactccttgacaagtagctgaatatttttgaatgataatttatttccaattgtggacacactgagttgaaaacctaaaaagacttaatgcttttggcaaataagggaagaaaagaatcttgctcattaatcaaaactcaatcataaacagaaatgggttcttatgtcacatttcctaaaagtgatggtgggcaaaatattgcttttggacttggagttagggacctaaaagcccaaatctattcatttcactcaaaatttttcagagacagtttcagttattaggatgtagcatgtagtttcatagataaatgaattaaacgtcaaatattagctttctttacttaatacacatagtagttgggttataatagtgaatgctctgggagaaaataaatattttcaacattgcatttgtagaacaaacattattttaaaacaattccacttagctaattttgttagtaattttattactccattgatattagttcatttttactgtgtaataatagaataaacaattgttttaagctttctggcctgcctgcctgcctgcctgccttccttccttccttccttccttccttccctttcctttcctttcttcctccctccctccctctctctttcttctcctctcctcttttcctttcctttcccttcctttcctttcctttctctctctctctttctttctttctttttttttttttgtcatagagacagggtcttgctctgtcacccaggctggagtgcagtggcatgatcatggctcactgcaacttcaaactcctggcctcaagcaatcctcctgcctcagcctcacaagaagctggaactacagacatgcaccaccatgcccagctaattttcttttctcttcttttcttttttttttttttttttttttggagtttctctcttgttgcccaggctggagtgcaatgtcgcaatctcggctcaccacaacctctgccttccgggtttgagtgattctcctgtctcagcctcccaggtagctgggattacaggcaggcaccaccacgcttggctaattttgtatttttagtagagacggggtttctccatgttggtcaggccggtctcgaactcccaacctcaggagatccacccacctcagcctcccaaagtgctgggattacaggcgtgacccacagtgcctggccgcccagctaattttttaaaaaatatattttttgtagagatgcggtcttgctatgttgcccaggatggtctcaaactcctggcctcaggtgatccttcagcctcagactcccaaaacgctggggttgaaggcatgagccactgcatcttgatggttttctggctctagactttgtgtctctacaacgtaaatgtgaaaagttagctcagacatagaggaaacattcatgcttctattttaagtagaaatgcctatgtgatactcaaaaattcttattttagttgtacatcagaaagttctgtttcaccagatcatgtttacagatagagtatgaggcattgatccatgagaggacttcattcaactaacctttactgagcacctactgtatgcaatgcaccatttccgatgctaaaacactgcaaagaggcagacagaaatccctaccctgatggaattggcattctgtgacacctctctaagtgtgtgcccccttccctagtgctgtgacttacaattctttttaaagcaattattattctggagaacccaaggattgcctctttctcagagctctaatgtcaataaccctatcattctttgtcattagacttttgcgaactgaggaattcacatttaatgaaaaattttagagccctttgtttatgccagacactgtgagttacatctatttgaaaagaaaattagacccatctaatttttgaaccatagttgaagcatattacaggtaaattttttatcacttaaaaatacttttcaggtactttctttgtaatgtcatttatttgtggaaggaattaagctaaggaaccagatcaactgggtatttagcacagaattttcagatacagcctttcaggaagtgtttggctatttattttattttattattatttttttaagacagagttttactgttgttgcccaggctggagtgcaatggcatgatctcagctcaccgcaacatccacttcccgggttcaagcgattctcctgcctcagcctcccgagtagctgggattacaagcatgtgccaccatacctggctaatttttgtatttttagtagagacagggtttcaccatgctggccaggctgctcttgagctcctgacctcagacaatccacccacctcagcctcccaaagtgctgggattacaggcatgagccaccacgcccggcctgaactatgctatttttaatattctagttacagattgagacctgcagtcataacctaaaatacaagctcttaggattttagtaattagcaagataaagctaaggacatgatgtttgtataaatgacttccatcaaagcaaatatctatgaattgatctgttaaaattgagctcaactcacataaatgagtgtgggcattgttagtccccatactggtcatttgggggtgccatttacaatactttcagggcatttttaatctaagtttaatttatattttactttctcagattgcttttaattaccttatgtaatatcatgtcttttcacactttcttccgtgtcttagattataaggaattattttcactgttgccagaatgagtagagaaataaaagtgaatttgaactggtatacctttgttcacttatttattcattaaatgtttactgtctgtttatcacctgccaggcaccatgctcatctttgtttatgcaacagtgacagcaaataggcattatctttatagttatggagctctaaccaaatggggttgacagggattcatgaagtaaccacagaatcaaacaaaacattgggaacgagaggagtgtctgcatgagatgaatatgtagaggcagtggagacctggaagccaggctgagtattagtgtctttattcagagggcagagaaaagccattcaatgactcaaagccaaccttgagatggggatattacccttaattatttgggtggaaacgaatacaatcacaaaagtccttaaaagtagaatagggaagcagagtgcaagaatcagagagatggcatggtgcgaaggactcagcccagtgttgttgactttgaagctggtggaagggcaccaccagccaaagaattccagaagcctctagaaacctgaaaagtcatgaaaatacattcttccctggagcctccagaaaggagtacaggcctgccttgattttagaccagtgacacccatttcagacctccagaagagaagacatttatattgttttaagcatctacactcaaggtaatttgtcacagcagctgtagaaaaccagtacatgaactgatttaaaacacaccaaacctattgcattggctgaattagtatccttattctcagatacagggaatgaggctcactgaggctgttggagttgcttgctgaagcccaccttcctcgaaggttatgtgtggggtcaaaattctgcatcctacagccagaaagaaaagtgtgaatgcaaggagcagttgaggtgcagaaatcaacatggtagctacagcaaagttgagtttggaaagcctccacatgggagaggaaggagggagcatcagctcttcaagggactagctcaggtgaaagtagacatttgggagctgtcagcagaaaaatttttcaaaccatgggaatcaatgaagtgattcatggaggtgacacagagagaagatgaaagtgcagtgaactcagacatggcgagatttagggctaacaaaagggagggaacccaaaaggagtgccccatgtgtcactcttgatgctgcctcctatgaaaatataattgcattgtaaaatatgtaaaggatttttaggatatggaggatccccagggcagccaagcctccttgtattgctgtaatgtagccaccccaagtcccctgactgctcttcaccaaagaccttcagtcatccgtcatgctccgttctcatgtcagcactttggcacgtgctgtgtattccctgctggtagagcatttaagctgcccaatattgtaaccatggccatcttcagctgtttaaatttaaattaattaaaatgaaacagaataaagaattaaattcctctgttaaacagaggacatgtgaaatgctttataggcacaggtgactagtgtttaccacagacagaacatttccatcacacccgccagttctgttggacaggactggctgagaacaccctcccacaggtctctgcagtgccactacccactgctacaccttcttcaagtcctgactcagaattgaacacacgccagccgccttatataaaatcagcactttttgtcaatccaccctactgcccttaccttctggttttttttttgttttatttttttgtttttttgtttttggggggggggtggtgggagacggagttttgctcttgttgcccaggctggagtgcagtggcgtgatctcggctcactgaaacatccgccttccggtttcaagagattctctggcctcagcctcccgagtagctgggattacaggcgcctgccaccacgcctggctaatttttgtattgttagtagagagggggtttcaccatgttggccaggctggtctcaaactcctgacctagtgatctgcctgcctcggcctcccaaagtgctgggattacaggcgtgaaccaccgtgcccagccaccttctgtatttatatgtggacttactacgttctaacataatatctatcttatctatgtattgtatttattctctgttattattggccccattactatgtaaaattcaggagggcagcagccactcctgtgtgattatttcattgctgttgaatggaagaacatgaacacactcagtgattgacttcagcgttgtgcatagcctataattctttttttaaaaaataaactcttgatgtctgctatgtaaaaattaaaacctctagtacatgatttctcttttagctaaatgcccggagtgcccacttttatatctgtttgctttctcggatttaaagttcttcttttctggttccaaagtgctcaaagcgaagttcccactagatcaacccaatttcatcaaagagttttctcctctgaaaactcccatcaaacacttggcatgatgttgggggacaagatgttaaatcacctgcaaaatggtgccatttggtgccatttcacactcctcggacacactggggtgattaataaacccgagactgtcaaggtctgctttcccacactcattgagttgcttgccgctattttatcttttttccccccactttattgtccaaagtaaagaaatgtacagaaaatattcctcttgccctgggaataaacgtgttcaaagggtcagtcttctggcctgtgtttgagaacaccaagtcatatttcagtagggatcagccatacagaaatgccacgatgcgcttggttaagggagagtgggaagcatacgtccctatcctttggacaaaagaacttctttatggcaatacataacaggaaataaacgtggatagccaattctgcaagtgtgaagggaatgtttttgttcttgtgtggattcaatagtatctcatctttatcaaaaaaaaaggtaggattgagaaacttctgatgattctcttttgcaacaggaattacgagagctgttgctaggtgttgcctttcattgtagggctttgcttactgtaaaaaccatggctaggttattctcaagacatctttggaatcattttgctatgaatttactaatttttttttctacttagtgcttgcacttcaacacaggttttcccttggcagtatattacttttttcccttactttgttcttaatgattaagtattcagaattactaattattataattattaagtaatcagaatctcacctcctttggctcactgtgcatttattggtcacctgtagagtttcatttcctctccttttctcctctcaagttcaagaaccccaggctacctggaatgtaacatccagcctattatttttgtttgcgtgttttggcattatagatcccactgtcaaccgatatcatgtgcggtggtttcctgaagcgtgtgcccacaacagaacaaccggatcagaggcatcatctggcatgacccacgtaaggacatgatctctaggccaacttgatctgtgaacataattagacaggaggatgtacaaactagacaggtcaaacagataactcattcccacaaatcagctatggagtaatgacttgatggaagtggaaagcagaatggtcattatattcactcattcttttatccattcacaccattgcactgggagcttactctgttatccacatggagcaaaacctaaagtgcagagactaaagacacagttcttaaagaactcccatatttcagggggaaatatgtctgagtatgtgtgtgcttcatcttaactggacaaaagctttgaattattttctgaattttgacatgtcaccgtgatctaaaggtgtaatggtacaagtggatttctatgtgactctatcattgagcaccatgtccctaactgccatcagctcagttagtgaaataatctccctgtcctgtatagcatgcaccaatattttgactttcaactttaagagaacattaaactctctgaggatagcaactctgtcaatattgcccaaaatgttattccaaatattttggggttcattcatgaattatagattagaatcaacaaactaacacaaaatatttaagaggtcattttattatacagtgtataatacactttgatggcagtttatatgtgatacctcaggacagtttaaaaaatccaaaaacatggccccaaacatagaatgttttggtttgtgatatgtaactagaatatttttgttttgaacattttctaaagcaagcacgatattttaagaaccatacctgctggcataattttaagagagtgagataaaacaagtcactggattttcagaaatacacagattctttttcttttttactggacttaatttgtctcatgttcagcaatgtttctccttgtatttatccttaaattagctccaatgtttgtgaccttcagtaaaataattaaacagacattctaaataaggaagtcgatttgaaaagcagagaaagcaataaacagaagctggaattattaatatttttgtgggcagaggggtgaggtttttgttttacttatatgtgtgtgcctcagaaccttacagaactgggcttatgtcaatgcaattccccaatcctaggcttatcatctttaggaactctgaaagtggtaacaactatttgctgagcagatgtaatgtatctggtagaaataaaaatcaaactcctgaaaaattatccttctaggggtttagaacttatctgtatttagttttaaacctttagatccaattattataatttgtttttatgctacaatggagcatccactaattcacttactgctgcagatgtctgtctcctatgcaatatgaaaacaatcttgaaatatctgtgaaacaggatccttaatagctaaccttggattccagtatagtcccatgtaaagagcagatttatttccaaagaaaagcaattcagactcccaaagaaacatggtggccttggcttgggcttgggttgggcttgggttggtcttgcgttgtccagattgatttgtttcctattcactgtttgtgctaactggctgcagagttgggtgcaccccatctcctgtcaccatctggatgaagggccagcacacctggaggtcactcccggtctcttttgaacattcagtgctctgtcacctgcagccacttccactcctcacttaagtaaatcactcaagcctcagttttgattttaattcttgtctcatgtttttcccgtcaacgctgctgctttctagcaagatcccctacccatcatccaatgagtgccagagatattccatctgtactttttttcctctcttaaaaaataattaaacacacacacacacacacacacacacacacacacacgtaaaaaccatggagtctcactatgttgaccaagctggtcacaaactcctgagttcaagcgatcctcccacctcagcctctcgagtagctaggactatgacacgagtcaccatgcccagctatccatctgcacttttatacatatacattaagaattggtaaatacaaaacagaatggataagtgccatttagccaaatatgaaagaaacagagatacacacctgttatcacaggaaatgtcatcttttgacattatcataaagttatattcttagcccgtgactccttaccatttagcctctttcttttatttatatttaatcacaacattatggcagaaaacagtaacagcactccaaaaaagggaaaaattatattgctaaagaatatcatcattttttaacagaaaaacttacatataaactaattctatgtctcagagaagcctgcgttagttttttttaactgaaaaaagttagatttgtatttacagctttacaccactacctgcactgctaccaactcaaaaatgctgattgcgaccttagaagtagcctgctttgatgaggaattattatgatactgtttaattctagaaggcatatcccgcagccatgggagtgtttcacaattgtcattaatcaaaatgtggacagtatgtgctttgtactttttataaaagccatattgcacacactatataggaaaacatccttgttggatggaatatgatttcaattcttgccagtgttttttaatccctaatgagatttattgctagcataattctctttctcttgctctaggaaaattacataattcttcaagatctgtcattttcctgcaagtataaggtgactgtccaaccaatacggccaaaaagtcactccaaggcagaagctgttttcttcactactccaccatgctctgctcttaaggggaagagccacaagcctgttggctgcctgggcgaagcaggtacgttttcacctgaaggacttctacatctaggtctacggtgtcagcagcgctttgcaaaccttgtcaaactgcgtttcacaagaccgtgaaaaccaaaagtgcctctctttctaagttgtgttatgatggcccaatgtggagggaagagatgtaggaatgaatgtgttattttaaagcctaacaggcttggaaagatgtcctttgatagtaatgttatccctttggaaatgaaggcaaacatttagataccgcttgtgttttgggaaagtttgatataattatttcattattttcccacccctttgctgcgtgggttatactcacacactttccatgccaacctggcaaacctcacatctgtaccttccatcccatctccttgccaatgtccctgtcttgcagtgggaaaaagtcttttaaatgccctggatttggccaggcatggcggctcatgcctgaaatcccagtactttgagaggctgagatgagagaatcacttgagccctggagttccagaccaacatgggcaacatagcaagatctcaccttttaaaaaaaaaaaaaaaaaaaaaaaaaaaagcttcggatttaataactcttctaacagctttaatatttaccttctcactgcagtcaatgctattctttaagaaatagttaagtcttgccagggtctaaactgctctcctgcctccatcttcaaaagagcattctaaaaatgatccccaaaagactggaagaagcatttagtacaaagttggagtgaggagattcctactcaacctatccccatatgtcaaaggggtgattgtctgaacccatgtttaaagaacaaggtcacattgcttctattaatatcatcccatagactggccgctgaaaattcctacaatggatcccttgggcacaccttctccagtcgcctaatcctggttttccttcttgcattgctgcaggtcatgttctttctaaggtgctagctaagcctgagaacctttctgcttcattcatcgtccaggatgtgaacatcaccggtcacttttcttggaagatggccaaggccaatctctatcagcccatgactgggtttcaagtgacttgggctgaggtcactacggaaagcagacagaacagcctacccaacagcattatttcacagtcccagatcctgccttccgtaggtcccacctcttgtactatgtctgtgtcattggtatctactgctcctttttactgaccttcagaggtggctacctctgtcattctgtgtgctgcactattgagtcttatttttgcattttcttcttctgagtgtatcttttgcaagcattaacacatcacaaatgtgactgcatagctaagaagtagcataagctgccatctagataaagtttgatggctagagccaactcatgaaaagaccttaccctatcttgtatataagtgattgagccattttcttctatctttgttaacctcatgtctctctggtccaagtgaacatgccctgtttgaagtgttgaattggggagggcaggaatagctaaaagaagcttgttgtttgtccgtcttccccgcaacttcaaatttggctcgaggctgtaatgagttggcctgtcttccaggccacttaattccttggcttcaaaaaaaaaaaaaaaaaatcatgtgtgggattttaccctctctgaaaatgcccttagaatagccaactaccgttacaaaatccaaaaagaggggcagagagggaaagaaacacaacttaaatctcagaaggaaaaattccatggaattagagagtagttattctataaatgtactaggttttattgagttttgagaagaatatgttggcataaaaataaacattttcagttatgggcattgacagatactgtgttttaagaaaaacagttggctcattcactgaaatttggactatcaagagttcacatcacaagatgtgcagctgaagactttaaaccatgggaaagttttacgttaaggaattaaaaaaataaataaaatcccaggagtgagccctgagaactggcacctcagcatattttaactctgccaagtgtcttaggctgccaagaattgagtgaggtgctaagaaaccatatggcagagaacccccacaaatgagaaatagtctataaattaaactatgcctttacaaagcaaccaaacttgcctgtgtatgatattctccagtgggggaaaaactgttctaggctctctgtgcattgcatgttgtctctgaaaggttgtcggtgagcatgctcttttatgttgtccccttaggatcattatgtcctaacagtgcccaatctgagaccatctactctttaccgactggaagtgcaagtgctgaccccaggaggggaggggccggccaccatcaagacgttccggacgccggagctcccaccctcttcagcacacagtgagtggggtgccagggcattaagccatcctgtcaggtcttgtggacatagagaaaaatcttgctggaaaatgaaaacaaataaatacactagtacaggtttctatgagatagggaaattgtcatcatctgaaattctttctccctgtttgtaccgacttactagattctattccaggcacctgtagtatacattgcatagttgatgcttaattgttctttttctccctccctccctcttccccgcttttctccctttctttgctccttccttgtttcctttctccatcctctctccctccctccttcattcttccctctcttcttttctcctttcctctatccttcctttgttttttttttccttccttgcattttcccctatgtaatgcatgcttttttccttgtcttttaaaccataaatacatatgggaaaaaaatctgtagtctcatatctgaaatatttttaaatcaagattttcatatatcacaatataggaaataatattttgctaaggaacttatgttcttgttacatagatattactgtaataaatattatgaattttcttcatgatatgacccaagtccacctacttcatttattgctaaatcaagtaaaatttaaaaagaaaattgtcacctagattttcaaaacagcctcttgctgatttttaaattatgtacttcgtttactttattttctagcttaaattttttaaaaaagtgtctgatgactagtgtgtggacaaaacattgagaattagtcatagttttaactctgatttttttaaatgatagattggtatgcttataattgataacttggtatgcttataatttgaagaaaaacaaaaactatcacaatgggagagcttgatagcctctaaaatttttgtcagataaatgcttttctgatattccttcatagaaattccttttaacagaagtatttgataatttttaaacttctttgagcaaataaaaaaggattatggtttgattggataagtgtgagcttaaggaaaggagcttgtcttctttttcttgttattttatagtttgggaagacatcaaagaggaagagaaaaacaggaaaaggagagaaagagtgtggttgtacattcagattcagaataggaaagacatggtcataggaaggaacatttgccagggtctcgtgctttttctacaaataaaggtaattctatcatttatttgatacatacaaatggatgtgactgacatattttgtcactttttaggatctcatcttaagcatcgtcatccacatcattacaagccttctccagaaagatactaaactgttcaaaaagattttgtgaaattgcacagatgtgtaagcttgttgaacttcggccacgagacatgcacacttccagaggcagtgggaactgctcagaggcccggactctcctatgtgactttagtgcaggaagaacttctgtcaatcatggacgcatctggagacaagtgagaaacagtagattggtgaagacagacaccagttccctacaagcatggagaaaatgaagaataggcctgtttaatgctaaattttgttttcatgtatggtgtcgctcatttctattgaattacaacagaactcagttttccctgaatttggagcaccaaactccgccccaaaaaggagagtaacaaatacacaattcacacataacactaagcgtaaatctaatcaataaaatatatttttgactaaattattgattcgatatgaaaaatcaactaagattacacagctttgtttttttgaatctttcctaagatcatttttatcctaggtgatttttaaatgaaaatgtgtaatctaaaatataccagcgaatttaaatctaaaaatgctcctactttaagtaccttgtgctgctctttatgcaaaggtaaatcaaagttccctctataaattatgatttacaaaagacacccaagccagaggaactcaatgaaataagctgctaatcagattttaccttggagaaatgaaaattatttcttggggatgccttttaatatttgatcctattatgtgagagattttcctgatatgttatcttatttatattttcccttattttcctcaatgcagataatagcttttggtgcacttttgtttcaccatctgaaaattcacaaaacttcttgcttcaaatgaaaaaatcccaactattgagcatgtttaaatctttgcagagatttgccttttcttaatcaaagaaaggtctttgtgtgctagaatattattggtaatgttttaaaaattcctttgattgatagagaaggacagttatttgcatttaattcacccatatgctttcaaatctagtatatcttactttttggaaatgttttatgctacaaattagtgccttgtagcatgaacttaagtcaaaacgtgttatcaatatagagtgttgcagtgtatattgtaacaacctaaaacgcagagaagtttaatttaatactgttttttttcttgaaggaatactcacatacatggtttgaaatgtgcatagatatgcatgtctatataattataaatgcatgtgtatatatatgcaaatatatgtacatatacatgtatatacacacagacacatgcatatacatgaatataccttgagcatgaatccctggagaaatcgttttcgtagctcaccaatggtgagtaaagatacagctcttttaaaggtcataaggataatatattttccccatcaatgctgattctgagaaaagagcaatttatcaaaattaaacactgtaaaagaaaggtgtccatatgtctttacctacctaagtaaaacaggaagaaaatcagtaacattatccttaggttttgacaatggtacttgcttcttgttgttttattgtttcctgaattcatgcagatgcctggccattcctgggaagagtggataactcagaagtcactgtactccacagagcctcactgcagtgtctaaaggtagatgcaaattaaaatgcagggaaaataacttttctgatgttgatgcatgtctttgggaaacacatttataaacatggatacctgataatagatattgaaacccatttcctgtgtgttaaaatatttaaaaagtggatattccaggaatgttttgcagctttgtacaagtaacataaattggacacctcagaatgaaagttcatgttggttctgaatggttcactgcagctcctgtcacaagctgggatggatttatcacattgagttatgaaattacctggttctaagaatttttgagtggcaaaaatagaaaacaatcttcatttgaaaacatccctaagcttgaataaatggataccatagatagcttctcttttttattctggtgtcattaccagcatctgaatttcaagttcttaaaatttcaaaaattaaaatttttcattattagctatccatttatcttttacatgaacttgtcatgaacaaattcaaatgtttatgccagcaaatttttgtactgttgcatagttaaaaatgctgggagtctctgcatagatacaaaatattattaaattattacataaatttaattttataaaatttaatcatgcttcttttgtctgggtaatagacattggacagatatttttagttcagatggtgattctgaagcttacatctcccttaaaaaaatctaaagcagctcttatgggcttctaattttaatataaataaataatttaaattttattggtgttattggaagaaaaatgctattaatgggctaataaaaaacatgtgtttctcttatggattttaataagctccagtattattcaaatgatcaaaaatatagttataattttttgaattttaaaaatgtgattgctctaataaagaataaaatctatgctttttaacaaacatagttttggtgcctaattctgtaatatgttttattgaaattagattcatttctctaatgtgagaaaaatatatccagtaatagtattgactgtttaaaaaattgagctcatcaaaaatattgtcatcaaatacaggtggttaatctgacatacattgcagttacatgcattatttttatttacaacatttgctccttaatgatgaatttatctgtgttaccctgtttttctacctggaactccatagaatgatgtttgcaaaccaacatgtgctcttttcagtcattcactgttttaatatgacatggtagagaagataaggtttatggcaggtaattttttgtaatgtgtattaaacgaagttcaaagattagaaatacatctgtgtcctgaaaaccttagatacatagccgactgtatacagaggttcatctcaacctcaacactattgacttttggggctggatagttctctgttgtgggggtttgtcttgtgcactgtaggtttttagtagcatccacactttctcctcaccagatgccagttgcaccctcccccaagttgagacaaccaaaaatgtctccagatattgccagctaccccttgagggatggtacctctggttgagaaccattgctagagaatgatctttactgaatttgccctttataagaaacccagtgaatttctagagcaagtcccaaaaactaagggacagctaagaagttattatggttgacttcaaaggcctaaactgtgttttttatgtccactaaacaacttgattaaaagacggaattttgactcgtgtctgtatcatacaagtacaaatactaattttgccctatgtatccgtaaatgtcatttgtgattttgacttatttatttaatgccctttcttatgccgtgggttttcaagtttactcatttctatggttgcaaataactctaaaacttattatataaactttcatattataggcagaacacaatggctaaatatctgttgcatgtactttaaagtttattataaaatataaacagatatataaagatgttgactcttacctgtgattttgcatggtcagactcggtgtcaggtacggagaggattctcatgactgtcttacctctactgaatattctagtgagttatatgatttacggagtgattaacagaggtctatataaagttacttttcccctttacttaattatattgtagtgtgcagataacaaaactgctaccttctcatccaagtggtctgtagaattcatgtcccttacagtggtcatttaaagtcaatatttatttatgtatgtaataaaaaaagttggatttttgtgtatgtctgtcacattatttagagagaagtaatcttgtaaaaatgttttgtaaaaaacaaaaaagtattgtaaatagtcttgatattctgtgactcattattttcatgttagagtttgtacatactggttcaataataaagtatccttaaaccaga

SEQ ID NO: 134 - DNA, 26115 bp, Homo sapiens
attcgcgtggaggcgcgtcgcgcgcagcggacgccgacagaatccccgaggcgcctggcgcgggcgcgggcgcgaaggcgatccgggcgccaccccgcggtcatcggtcaccggtcgctctcaggaacagcaggtgaggtctccgcggcccggcttcgcgccgtagggtcgccgcgctcctcgtcggccgggggcggggttggagaaggcgggcagagaggccggaaaacgcaggcgccagctcgcgcccaggtccgggccaggttcagctgggatgcgtgagccgatggaggctcccctggcatctgggagtgagtgtccagagaatagcttccctagttgacccacgagccatgtctgtgcccacgaatgtgggagcctgaggccatggggggtccccgagagagagagggtgtctgggcacttgcccatgaacggaccactgcatgcctgagagagaagggccctgacaccaggaacttgtgtggactcagggcgagtggccacctggaaggacacttctcagccagtgtgcccactgggagggggacagcgtgtcccttgctggctcgagtccacagggcaccagctgctttgggcacaggggagctggttctggggctgctctactccatgggggccatggtgaggatgagaccaggccaggttccttggttgggccctgggccctatgccaggttggctctgagttggatgcgcactgccagccaggatataaccaacaatgtccccagattcccgtgccacctggggccaggcaaaataggttaaaatccactggcagacccatttgtaagtgctccgagtgcaccgtcaaggtgggagcttgggaatgggcgacctcacctgccgcacctggacttgccagcacaggtctcttctcaccttgccagtctgcggcttccttccctcctgcgccccctggctacgcaggcctggaaacagctccttagggatcccagctgaacagctcctgggcttgggctatacctcccagtgggagggtctggcctggggtctgagggccaggggtggtgtggtgggcggggtgtgcctaacatccaagaatctactccaaataagggaaaatatgaaagagctggattttggcttcccaggactgcccgatctggtggctttgggatcgggcgacatctggcggttgatactatgttctagggacaagaaccctctacacgcccattccttgtttcctctaaatagggaaaagctagggctggaagacacggcacccacctcctgacactctttctgctggaattgaccactggtcactctgactcagtttccctgagctctgaagattaaggaatgaacccagacaacccagctcaatggcccttagtggagagagagtcaattattgatggaattccgtgcctgggaacttgctttccagtggggcagggggaccagaaggacaacttcaagcccgtcttgaatggggcccgtgcagggaggggtctgtatgggttcccccttcccagccctccctcccacctccaccccagctcccagacgcccaggcgcacttggtgcaggtgtgtctcaaagtggtcaggagaggggacaatatacaggggttggcctcagtactggaaaatgccatttgcaccccctaacaccactactagtgggaaaaaccagtggggccacaggctgccccgaagtgaatgtgctgggcggatcacagccccaccacgtgtcatgtagacacccagggctacaggagagtcaaccatatttgggcatgacgtgctggccaacccagggcctccatctctcactggtctttagcagataaattaattattactagaattgaacaggagggacagatacctgccttcctagaaaaaaaaaaaaaacactcagaggaggaaacattctggagaggggaggtaccgaggactgagagggaggggagtgcacaatggggaggaagccataggcaggctggcttctgactgaagatagtagcagtgagcgtccccagccgtcccctggtcccagtctacatctcggcacagcagccactgcaccatctccagagttatctaccagaaaattttgagtgaagagcccccacagctctggggacacaaccccccaggcccctgatccctgtcctcaggcctcctctgcacctgccaccacacctgaagcccacccagacccaggtgctcagagcctgacaagtcttatgggaacctctgagcaggcccctctgggtctggaatgccactcccgtgtttgccccctgccctggccacgctgggctgaggggactttccgacaggagaggaccccccgcttcagctccccccagtgccccgggtgaactggcatgaagggttaggcgggcacacgtctctgcatgcatcgcacggcgccctctgcccgcgcccactggcgtgcccgtgggcatgcccggaccccttcgaaggctgcttgctcctggagtgccggcggcctcctggcccagtgccccatatcctcccgggtggagggaagcagagagggaggcggtgggaagcagcgggcacaggtgcgcgggcgagggccctacggactgggaaggcgggcccgtggcagggggtctgcggggaccgcgtaggcgcaggccttgccctgcagccgcttcccaggtgatgagcacacaaagcgccctcggcagtgcctggtccggggctgccgctctccaggggttcgctcttagggttggccccttcccgccgctgccgggccggcggacggggatgccgccggggaaccctaggccctgggggcccggggaagggggatgacggcggggggtagggatgtgcagggacggggcagagcccaagtgacttagggaagagagccaccccaccccccgcaggggccctggggaaggaaagtcccttgtaaggcgcgccggctgcaggccaagcagtcccgcgccagacactgctcagcctttcctcgctctagggcgcgtttcctgcagcgccaacgcgaggctgcggggctgggagcatccttgcccaccccactgcccagcgacccaccctggagcccgggtttcgcgtctgatcagccgaacccgggggcctagtgggggcattccaacgggcggggcggggtggggcaggcgcgccctcgaagccccaccccacggcccctccccgcaggaggcccgccctctggccccgccctcctcccgcatttaaagggctcgctctctccgcagcgcaacctctgctccctgcctcgcctcccgcgcgcctaggtgcctgcgactttaattaaagggccgtcccctcgccgaggctgcagcaccgcccccccggcttctcgcgcctcaaaatgagtagctcccactctcgggcgggccagagcgcagcaggcgcggctccgggcggcggcgtcgacacgcgggacgccgagatgccggccaccgagaaggacctggcggaggacgcgccgtggaagaagatccagcagaacactttcacgcgctggtgcaacgagcacctgaagtgcgtgagcaagcgcatcgccaacctgcagacggacctgagcgacgggctgcggcttatcgcgctgttggaggtgctcagccagaagaagatgcaccgcaagcacaaccagcggcccactttccgccaaatgcagcttgagaacgtgtcggtggcgctcgagttcctggaccgcgagagcatcaaactggtgtccatcggtgagggacgccccgaagcgccgggcgggcgggggcggggactccgtgcgtccttccatctccccgggcggacccctccaaaccacccccttccgggccgcagcgcaactcccgaggcctccggctgctctgctccacgcgggcctgcagaacaaaggcgcgcgggctggctggctggccggccgggcgtgcgaaccgctacgcgcccccgcccgctgcgccccggctggccggcgcccaggctgaactcacatcctccgcaggccgcgcctccgcggctgtgctcgcggtgggagtgggcctggggggtcgggcactgggcaggctcctggccctgcgccccgtccccgaggaggaggaggcccgggctctccccccacagctgtttagagagggccctctggccttcagaggcccgttggttctgaagtgtgggttggagctcgtgcgtcccattgtctggggctctgggctctttgtgtccctggaggatgggtcgcccatcggagatggctccaaccaccagtttagatctacccccccacacacacacaggcaacctgggggccagaaagaagcatagttagcaaaactgcacccggggtgagttgggcgtggttgactgagagacctggcttgtagactacttggacgccaacttttctcttcatcttgggccaaactcttgcttccatgtaggccttgcttttctgcgtgtagcacgcaggagttggttggtagatgctccagcgtgcattgtgccagcccagtgtctgtgtcactggactggagaggctggcattgaccaggcctgctgcagcagcccaattcgttctcaagataggggctgcatgagagggcaggccccagaatgggtgactcgggggtgatgtggaacagggagaggagagggatgatgagtcttctcttcttcagaattgagaggccttccagttaccctgcagccctggaatggcccttgctgaacccaagaaagtgagggaccaagacttgggttcccccagccactcagagggcagatcccaagaaccaaagttctttctttggaatgccagttgaggcgaggggcaggcccacccccacaagtcccagcctcagtctagccaagctgagtcatctcagtcctggatggtagggggggcgaccggatgtggggaggcgggccacaccccagctctttagggggggtctcctccctcctcccagctcccctcctccttgtgagctggctggagcaggcctagttcccagagctttgccatataaggcaaaaaaatgttggaaagcagcagtgattaggggagggaggggttggctggcccaggggctggggaaaggggggtgggatggggcggggccatccagccagacagtctcccagccctgggccctggtccttccctctctcttttgggagggggatggggacggagtaggctggcctaacatggacctggtgggcctggttgctccccgtgtgggggtcgttgaggggtctgaggctggactggggtgggggcctgatgggaagccctggctggccttgttccctggccctgcacccttggtcctctccgagtccccctccctgctgccatttggggagagtgaaaggcagcctcgtggggccaggaccaacctgggaactggggaggccactctgagcggctcacctggccctccaggtgctgcctgctgggctgggaagcagctgccatggacagcccagcccctcctcataggcccgccccctagttgactcaccagagaagtattttgtctgattatgggggaggctgacagggcttctaaagatgagccatcctgccttgagcctgagacccagaagtagccttgggtggggcccagagcccagcagggttgccatggtgatggggggtgtcagggacccgccctaaccacttcccctgtggcgagcctgccgaggcccagaggcccgttaggtggcaagtgggtcaggcagtgggtggcaagggggttcccagtgtctcctgctgccaccccggcatctcccgatgggccccagtgagtcagggccatgtggcccaactgctggttcctttgggctctgggcccctcccctggctaggcctgtggcctcccaactccaagcttgagtcttcgaggtggtagaggaagtgggggtggtggcgggggtcacaatccctcacccaaagggcgtttgcccaactcccccacttcccctgcctcaccccacccaccctggaacaacagttgtatttcccaaccacccagggccacccaccttcctcttcctcagccccagccccactccaggtcatgggccctggattctgggccagctggagtcagcctcctcctcctggttccccataggcccctgaggtgtgtggcggacccctgctctggcagctgtggacactgtccagctgttctccagagctgcccatctgcaggctgggtctgccctctgcccttcctctgggcccagggcttctggcagtaatcataccctgctggcatcgtgtgtgtgtgtctgtgtgtatctgccctcaccccaaagtctccttcacctctgaacaccccctgggaccctgggcagagagggcctcatccacatcctaccactggccaagagggggtgtctacctcctccttggcccctgctaccccgtgctgccagaccctgaccccaaagcctgggatcggcccctcccgcacagccgtgtgcccagcgtggccactcttctactcacagacagcaaggccatcgtggacgggaacctgaagctgatcctgggcctcatctggaccctgatcctgcactactccatctccatgcccatgtgggacgaggaggaggatgaggaggccaagaagcagacccccaagcagaggctcctgggctggatccagaacaagctgccgcagctgcccatcaccaacttcagccgggactggcagagcggccgggccctgggcgccctggtggacagctgtgccccgggtgagggggcgcagaggcaggagagactgggctggggtcacccatgggtggcccttgagggggttctgcggcccccagactcacagcctcccttgcgccacaggcctgtgtcctgactgggactcttgggacgccagcaagcccgttaccaatgcgcgagaggccatgcagcaggcggatgactggctgggcatcccccaggtacacccgcccggcctggctacagctgtaggggaccggatcggcagttgggagagactcggaggcccgatggctcctgttttctgcctgtgacaggtgatcacccccgaggagattgtggaccccaacgtggacgagcactctgtcatgacctacctgtcccagttccccaaggccaagctgaagccaggggctcccttgcggcccaaactgaacccgaagaaagcccgtgcctacgggccaggtgagggagccccaccaggggtgcacccgtgtgccaacgtcttccccataagacagtgtcccatctaaacgtggcggtccccaggggtcttgggttacatggcggctaggtgatcaagccacccaagagtcagacaagagtgggtttttgggactagtgaaaacgacaagagaatgctaataggttcctccagtcacagaagcctgctgcgtggggtcctcggggaggtagcatccagcggtctttattataaatggagatgaaccaggtctcagtaacagggacctaaaacccagtcaaggctcacacaggaacaagggcccagtgcggtgagaatgaatgttccagaaaacaggctgggcctgtcccagcagcgagagcacagctgggtcccgaggccaggctctgtgccacagctcacactgaatgaacttgcccagtttggaatgtgcctgacttaggggccagcagggagggctgaagggtggaggggtgaggctgtggccttaacagctggcccgtggttggctcgccttcccctgccaggcatcgagcccacaggcaacatggtgaagaagcgggcagagttcactgtggagaccagaagtgctggccagggagaggtgctggtgtacgtggaggacccggccggacaccaggaggaggtagggccagctgctggcagcagaggccccgcagcgctccctttcagtggggctgctcttagcaaaggctcacaggctccttcccactgcaggcaaaagtgaccgccaataacgacaagaaccgcaccttctccgtctggtacgtccccgaggtgacggggactcataaggtgagcccttggccaggggggaggcttgtgacctcaggcagtggctggaggcccccagccctaccctcacggcccacccttctggggacaggttactgtgctctttgctggccagcacatcgccaagagccccttcgaggtgtacgtggataagtcacagggtgacgccagcaaagtgacagcccaaggtcccggcctggagcccagtggcaacatcgccaacaagaccacctactttgagatctttacggcaggtgaggggaggctgccaaggcccagctggtctgtggggagagccgcactggggcctgggagctgagcaggtgcctcgtggcaggagctggcacgggcgaggtcgaggttgtgatccaggaccccatgggacagaagggcacggtagagcctcagctggaggcccggggcgacagcacataccgctgcagctaccagcccaccatggagggcgtccacaccgtgcacgtcacgtttgccggcgtgcccatccctcgcagcccctacactgtcactgttggccaaggtaggcccggccctgactgccctctgctgtggcactgcagtctgggcctcccacaggagggggaccccctgggccagtcccgctgcagcccgccccggggcccctactctttgagcttctactgtctgggcacatgctgtttttcctcccctgctggggcccttcctcctctcctctcctcgcccctctccatctctctcctcacgctttcaccttcggaagagctcgctccagctgtctagaaacctgctgctctctgctctgcccacagggtcaacggtacttggatctgtcttcttcttggaagggggaggctggggggctctgggctggtgtggagcaggtgggaggaggcctgccatgtcctggcccaggccacagttcctggggtcacagtcccttccagttctgtcttgcatgtccccctccagccaagctctgagggacccaccaatcctgacagcccggccctgtgggaggcaagggaggggtcgcccagccgagctgctggtgctcagctggcccctctgcctgcagcctgtaacccgagtgcctgccgggcggttggccggggcctccagcccaagggtgtgcgggtgaaggagacagctgacttcaaggtgtacacaaagggcgctggcagtggggagctgaaggtcaccgtgaagggccccagtaagttggcctggagccaggccaggatgggtggcggcagcccccgggttcactgctgggcaggcctgaggccctccttgtcttggcagagggagaggagcgcgtgaagcagaaggacctgggggatggcgtgtatggcttcgagtattaccccatggtccctggaacctatatcgtcaccatcacgtggggtggtcagaacatcgggcgcaggtgaggcccccaggcatccctctcccagctctgcacactctgcctcttctcttccttctgcctccccacctgatgatgaggggccacatgggctcttcctgcctggccgccacagtggggcccacgctggctcatgtggtgatcctcggtgttccctgtgtggctctcgcatttgcagtcccttcgaagtgaaggtgggcaccgagtgtggcaatcagaaggtacgggcctggggccctgggctggagggcggcgtcgttggcaagtcagcagactttgtggtggaggctatcggggacgacgtgggcacgctgggtaagttggaggctgcagcatgggcacctggggacagacgatggcaaggacggcccaccctgaggctccagggcactgaggggactggtggctgttgtcaggcttctcggtggaagggccatcgcaggctaagatcgaatgtgacgacaagggcgacggctcctgtgatgtgcgctactggccgcaggaggctggcgagtatgccgttcacgtgctgtgcaacagcgaagacatccgcctcagccccttcatggctgacatccgtgacgcgccccaggacttccacccagacagggtaaagagcaggctgtgatggcctaagtctcgccctgctgctcctgcttggggtctggtggggatggcactctgtgtccctggccaccctgcctgggttgtagctctggcagcctggacctggccccctgacagctgggtggtctcccgctaggtgaaggcacgtgggcctggattggagaagacaggtgtggccgtcaacaagccagcagagttcacagtggatgccaagcacggtggcaaggccccacttcgggtccaagtccaggtagagcacccacgggtgttgggggcagggcaggtgtgggcacccaggcctgggcactgaccagcaggccacctgctcctatctgcctgacaggacaatgaaggctgccctgtggaggcgttggtcaaggacaacggcaatggcacttacagctgctcctacgtgcccaggaagccggtgaagcacacagccatggtgtcctggggaggcgtcagcatccccaacagccccttcagggtgagccaacctccaccggcctttagtccatctcgatagcattcacgtagcacacgattcgtccatttcaagtggttgtggcacaccatcctgactcccctgtcccacagctcctggtgaccactaacctgctttctgctgtggctttgcctatcctggacatgttctatagatggaactgtgtgccatgtggccttttgtgtctggcttctttcgctcaccacgaagttttccgtgttttcgttcatgtttggcatgtcttggcactttgttcctttataattattttgtttatttatttatttatttgagatggagtctcacactgtcgcccaggctggagtgcaatggcgcgatctcggctcactgcaggctctttctcccaggttcacaccattgtcttgcctcagcctcccgggtagctgggactacaggcgcccgccacccccccggctaattttttgtatttttagtagagacaaggtttcactgtgttagccaggatggtgtcgatctcctgaccttgtgatctgcccacctcggcctcccaaagtgctgggatgacaggcatgagccaccgcgcccatcctggttttttttttttgagccggagttttgctcttattgccaggctggagtgcaatgacgtgatctcagctcactgcaacctctgcctgccagattcaagcaattctctcctgcctcagcctcctgagtagctgggattgcaggcatacgccaccattcccagctaattttgtatttttagtagagacggggtttctccatgttggtcagactggtctcaaccgcctgaccccaggtggtccgcccaccttggccttccaaagtgctgggattacaggcatgagccaccacgtccggccgcttcatttatttttatggccgcataatactccattgtgtggccagaccacattccatttttccgttcacttgctaacagatattgaggatgagcttgcctttggtgatcatgaacagtgctgttaacagtgagtccaggtgtttgcgtggacatttgctttcatttctcttgggtagttgcctcggagtgaaccggagcatcacacagtccctctgtggtcaactgaggaactgccagactcttcccaaggcagctggaccattttgtgtgcctgccagtgtagctgagggagcttctgagtctcctccaggctgctcatgcccttgcccttgcccctgtgccctgcaggtgaatgtgggagctggcagccaccccaacaaggtcaaagtatacggccccggagtagccaagacagggctcaaggcccacgagcccacctacttcactgtggactgcgccgaggctggccagggtaaggcctggctgtgggtgggagggcaggtggctggggtgtccctgcgaggtctcagcctccgctcctctccccgccgcaggggacgtcagcatcggcatcaagtgtgcccctggagtggtaggccccgccgaagctgacatcgacttcgacatcatccgcaatgacaatgacaccttcacggtcaagtacacgccccggggggctggcagctacaccattatggtcctctttgctgaccaggtgggtgctgcgctcctggccgctaagatgtcattgcggatgacgtctgccctcctctaaggccttctcctcccactgcctgcaggccacgcccaccagccccatccgagtcaaggtggagccctctcatgacgccagtaaggtgaaggccgagggccctggcctcagtcgcactggtgaggacaggtaccccatggcaggttgcggggcatcaagggtaggagggcttggggcagggtgcccctacatggtccctgtgtgttcctcaggtgtcgagcttggcaagcccacccacttcacagtaaatgccaaagctgctggcaaaggcaagctggacgtccagttctcaggactcaccaagggggatgcagtgcgagatgtggacatcatcgaccaccatgacaacacctacacagtcaagtacacgcctgtccagcaggtagccacaccctccactacagtcaccgagtccccagcctcctcatgcagcagcctaggggacagctccgagggactttctgcccactctcattccttacctgggagaggacaggcatggaggtccaggagggggttggggagcaattctggtgtctctaaatacccccttcccttctgcacccttcccagggtccagtaggcgtcaatgtcacttatggaggggatcccatccctaagagccctttctcagtggcagtatctccaagcctggacctcagcaagatcaaggtgtctggcctgggagagagtaagtagttggggcccttgtcgcaaaggcctttgtcacatccagggattggctgagctgggtgtcatgtctctctccttcctttcatcgtttccacagaggtggacgttggcaaagaccaggagttcacagtcaaatcaaagggtgctggtggtcaaggcaaagtggcatccaagattgtgggcccctcgggtgcagcggtgccctgcaaggtggagccaggcctgggggctgacaacagtgtggtgcgcttcctgccccgtgaggaagggccctatgaggtggaggtgacctatgacggcgtgcccgtgcctggcagcccctttcctctggaagctgtggcccccaccaagcctagcaaggtaattggggtatgggaggccctaagggtagaacccactgtgctctctgagggccccaaaggtaccccatcttctccagacctgccctaaatccttttttttttttttttttcctgagacagactgtcaaccttgaccctgtttaagtgagagtaaaggggaggagggaaatagaaacccacaaaaagtcatcagggttgaagaatttcttttttttttttttctttctttttttttttttttttttttttttttttttttgagaaagagtctcactctgtcgcccaggctggagtgcagtggcgcgatattggctcacggcaccctccgcctcctggcttcaagcaatactcctgcctcagcctcccaagtagctgggattacaggtgcccgccaccatgcccagctaattttggtaattttagtagagacgagatttcaccatgttggccaggctgttctcaaactcctgacctcaggtgatccacccaccttggcctcccaaagggctgagattacaggcgtgagtgaccgcgccctgccctcctttttgtccttatgactgatggatggcccatctggcaggcagcctgggcccgcccgtgtccctgtttggtgagggcaggaagccagggcaaggggaggcaggtggaaagtcaagcaggaggtctgggatcggggcatagtgtggccttggctcctgaccccttcttccctcaggtgaaggcgtttgggccggggctgcagggaggcagtgcgggctcccccgcccgcttcaccatcgacaccaagggcgccggcacaggtggcctgggcctgacggtggagggcccctgtgaggcgcagctcgagtgcttggacaatggggatggcacatgttccgtgtcctacgtgcccaccgagcccggggactacaacatcaacatcctcttcgctgacacccacatccctggctccccattcaaggcccacgtggttccctgctttgacgcatccaaagtcaagtgctcaggccccgggctggagcgggccaccgctggggaggtgggccaattccaagtggactgctcgagcgcgggcagcgcggagctgaccattgagatctgctcggaggcggggcttccggccgaggtgtacatccaggaccacggtgatggcacgcacaccattacctacattcccctctgccccggggcctacaccgtcaccatcaagtacggcggccagcccgtgcccaacttccccagcaagctgcaggtggaacctgcggtggacacttccggtgtccagtgctatgggcctggtattgagggccagggtgagttgccctgccgtggggtatgtgacgggggacagggaccagaacccccgagccccaagcctcctctctgtgcctttgcaggtgtcttccgtgaggccaccactgagttcagtgtggacgcccgggctctgacacagaccggagggccgcacgtcaaggcccgtgtggccaacccctcaggcaacctgacggagacctacgttcaggaccgtggcgatggcatgtacaaagtggagtacacgccttacgaggagggtgcgtgctggggactcccacaggctggcagacggggtgggtggggtggcccgggctcctcctgacctggcctgcactcctccaggactgcactccgtggacgtgacctatgacggcagtcccgtgcccagcagccccttccaggtgcccgtgaccgagggctgcgacccctcccgggtgcgtgtccacgggccaggcatccaaagtggcaccaccaacaagcccaacaagttcactgtggagaccaggtaagggagcccccaggagcccgtgtggctggtgggcctgggaaccccaggaatgaccggctgtctgtttggaccaggggagctggcacgggcggcctgggcctggctgtagagggcccctccgaggccaagatgtcctgcatggataacaaggacggcagctgctcggtcgagtacatcccttatgaggctggcacctacagcctcaacgtcacctatggtggccatcaagtgccaggtgaggaggtggcggccagggcagggctgggactgtctgctcgtccccaccctgtctcatacagccgccatccctttgccccaaccctcaggcagtcctttcaaggtccctgtgcatgatgtgacagatgcgtccaaggtcaagtgctctgggcccggcctgagcccaggcatggttcgtgccaacctccctcagtccttccaggtggacacaagcaaggctggtgtggccccattgcaggtcaaagtgcaagggcccaaaggtgagtgtttgcatgcctggagccaggggtcaggagggcagtgtcctgtttgagggccgggaaaggaaactggaggcccaaagtgaggaccagagtgcagaggtggtgcaagtgtgtaggtgtttttggaagagcctcaggtgacagtgcagccaggtgggggacttggaggaggtagagcagatgggactggtcactgagcagatgtggcaggaaggcaggcaggcaagggtcccagctggcacccagatgggtgtctttcgtgccagagggggtcaaggccattcccagggtcgggtggatgaggataaagcgaggtctaggcctggggctgggtcctggccgtccagtgtggtggggtaggaatggaggcccaggagactagctgatgctctgtccctggggctggggccaggcctggtggagccagtggacgtggtagacaacgctgatggcacccagaccgtcaattatgtgcccagccgagaagggccctacagcatctcagtactgtatggagatgaagaggtaccccggaggtaagaggcagggcctgctgcctgtggggagtggcccaggctggatgctgagaacctgtctgactgctcacaacaccaatccctcacagccccttcaaggtcaaggtgctgcctactcatgatgccagcaaggtgaaggccagtggccccgggctcaacaccactggcgtgcctgccagcctgcccgtggagttcaccatcgatgcaaaggacgccggggagggcctgctggctgtccagatcacggtgagctccgggcacaggcaggggaggcaggggggcctgggcggctggagtgtgggctgcgggtggctggtgtctgatctccctgcggagctgcaccaaggagggcagggaaggacagggcccctgtctttggtttgctaaggttgtgactaccttaggatggtggtgacaggcacaggcttccccagacgtgcacttgctgctaactttgagcacgtcaccaaagccttctgtgcctcagtttccccacctgtaatattctcatggggcaggtataggatagaagcttgagatcaccccggtgagctcctcctagtgctggccaggccctggggctgaggatgggtgccaagctggctggccgcgcctgttgtcatgtgggaagtgtgggatgttttagtctccattctggactctgccaggtgcaggcagcccttttgggccatagcagttaagatgcctgaggcccagagactgtccctgtagcagcagcgctgggcactctgggagcgcctgaggcaggcccggggctactcgggcttgggccaactgcctcccctgcctctgccacacaggatcccgaaggcaagccgaagaagacacacatccaagacaaccatgacggcacgtatacagtggcctacgtgccagacgtgacaggtcgctacaccatcctcatcaagtacggtggtgacgagatccccttctccccgtaccgcgtgcgtgccgtgcccaccggggacgccagcaagtgcactgtcacaggtgagcccgcccgctgttggccgctgcggcgctcggcacggggcttgggttgtgcctgtgtgcaagggctcgctgcttggggcggcgtgtgggagtgggggccgcccccttgagtgactcacctgacctttctccttgctctctgccctctcacctcagtgtcaatcggaggtcacgggctaggtaagctgcttgctggggccactcccaatgcccctcctgcccagaggggcagcttcctttcctcttggggccgattcccaggacagttccagctgcagctctaggcagggacagagttgggtggggtgcagaagatgaggccgtgggctggagggcgagggcccagggaggcttccggagctgagcatgaccgctccagctcttcccctctctgggcctttatttccccatctgagaactcgggttgcagctgagagctttggggtgaggtgcatcctgagaggcaccccactggggactttggggtctcgggatcttggcacccagggaggcacaagggctcctgcgtgggctgagggaacaaggggtctccccaactcaatgggagccccagccctggccagatccacagacccccatccccaccttccaggggcctctgcgtcccgggccgggggaggtgcatgagcgggtggggctggctggtagtgcagtagcgccagtgtcgactgcttgggcggccagcatggcggggcccggcccagcctcagagccccaaagtgcattctgtggcccgtctccctccttcccccttcccctatcccccagcagtgacgttattcagacattccccaacaggcatggagggtcacctgccccagccagggacacccagggatgctgatgagaggctacaggcctggcacttgggcgaggtggctaaggaaagggtgagagggtggctagagttttgcggcaggagcgagatggctttatagagcaggccgtaggatccgatgtgtgtgtgacaggcgtgtgtgcgcagggcgggggaggctggggagtactgattgcagggccttgggggctttgagggtgggagcaagactcagtaacctcagtttccctggctactgtttgcagaatggagacagggagcccggggtggggaagggggcgctgaagttgctctctggcaagcttgacggccacggggcttcagtgagagccaaattaggaggcatactttgaggatggagtggctgagacctgcggttggctgggagccgggcagggaaagtgggggcagtcgggtacctgtgaggttggggcccaagccactaactagatggcatggggtgcacatgagtgaagcctcccagggcagcgtgggcagccggcagccaggtctggagcctgggagagctgcctggccgcggcaggccagcatggagcctagtgcagcaggagccctcggccgatagtgggacttggtggcagggcccctcgagcttggccttcaagtaggtttcgtgctcctggctgcttccctggcaggaggccaggctgcagggggcactctcactgccaggcctcacagcccacagccccccaagcctccacggcggagacccagatcataacgtcactgtctctcccctttcctcgggcactctggggccctggagcctgctcagctgctctgccctcgcaacccagcagtggtggctgtagcttgggcctcctgttccctgtctccctgggtgctatccccgctctgccaagcctgctgcgctgcgctactcgggtgctaaccccgctgcctcccgcttccccgctcccactcctgtctgcaccgggctgcttttcaccgcgagccttctcagttgtcaggaaactccggtttcaccatcaggcctggggggtggggaggcaagtgtcacatccccccacgctgcagcaggactccgcctcaccgcgtccacacacagcaatgggggccggggccaggccagaagggcgcaggcagccgtgtgcccagccagatgctggcgttcagcagtgtgggccatggtgctggacgaggctgagtaggcaagggagtggctgtcaacacttaggctggagtgggcccttccttttcctcccaggcacctgggtgctactgtcgggcctctcccacatgggcacttgaggtggtcaggagaaaccttcctgccttctgagaaaccactcgccatcccagcttggaggggcagggcggggcaggaggcctggcggcctggctgtgcttggtggtggcaatgagaggcctgtgtgggcggcaggcggacgggaacaacctgaacccgagctcacacgctggcccccctttggggacccaccctgccccaccaggtgctggcatcggccccaccattcagattggggaggagacggtgatcactgtggacactaaggcggcaggcaaaggcaaagtgacgtgcaccgtgtgcacgcctgatggctcagaggtggatgtggacgtggtggagaatgaggacggcactttcgacatcttctacacggccccccagccgggcaaatacgtcatctgtgtgcgctttggtggcgagcacgtgcccaacagccccttccaagtgacggtgaggaggggtggggggtaggtcagcaggggtgtctggcaggtcccggcctgttcccctggggcccctctgtgacaacagactctccagcagctctctgctttgccctgcaggctctggctggggaccagccctcggtgcagccccctctacggtctcagcagctggccccacagtacacctacgcccagggcggccagcagacttgggtacggcctggccagctagggacactggggctagccagctgggtgttctgtgagcccctagtttaccatgtgtgaggagggaccccagatcctcccactgtccctcacccatgccctgtgtctccactgcaggccccggagaggcccctggtgggtgtcaatgggctggatgtgaccagcctgaggccctttgaccttgtcatccccttcaccatcaagaagggcgagatcacaggtgagtggggacttgggaaggagctcgggagccaaggaggccagactgtgccaatgagctgccctgacctcagccccactgccccacaggggaggttcggatgccctcaggcaaggtggcgcagcccaccatcactgacaacaaagacggcaccgtgaccgtgcggtatgcacccagcgaggctggcctgcacgagatggacatccgctatgacaacatgcacatcccaggtgggcctgccctgcctctgcccactccaccgccaccacctcacagagagatggggctgggggacacacgaggctgccattccacaaggcccttcttcctgcctcaggaagccccttgcagttctatgtggattacgtcaactgtggccatgtcactgcctatgggcctggcctcacccatggagtagtgaacaagcctgccaccttcaccgtcaacaccaaggatgcaggagagggtgagcaatagctctggtcttgacctgctctgtgcccgggatgccctcaccggggtaagggctggactcaggagatactcctgaatggggctccctgccctgctgccctggccatcggagctcctcagtgcaggccaactggagtgtccccagcatagttcccatgctcacccacggctctctccagggggcctgtctctggccattgagggcccgtccaaagcagaaatcagctgcactgacaaccaggatgggacatgcagcgtgtcctacctgcctgtgctgccgggggactacagcattctagtcaagtacaatgaacagcacgtcccaggcagccccttcactgctcgggtcacaggtgggtggcactgggagcagtgacagaaacgggtggcagggtgggcatggtctcccatggctggacgcacactgatggctggcctgtccccaccaggtgacgactccatgcgtatgtcccacctaaaggtcggctctgctgccgacatccccatcaacatctcagagacggatctcagcctgctgacggccactgtggtcccgccctcgggccgggaggagccctgtttgctgaagcggctgcgtaatggccacgtgggtaagcggctgaagggtccagggggttcagaaaggaggcagcctgtggggagccatgccctccctgactgacagccatgccctgtgtccagggatttcattcgtgcccaaggagacgggggagcacctggtgcatgtgaagaaaaatggccagcacgtggccagcagccccatcccggtggtgatcagccagtcggaaattggggatgccagtcgtgttcgggtctctggtcagggccttcacgaaggccacacctttgagcctgcagagtttatcattgatacccgcgatgcaggtaggcagtggctgcccaccagctggggcgggagcactgtgcatagcaccgaggctcaggggtatccatcccctaggctatggtgggctcagcctgtccattgagggccccagcaaggtggacatcaacacagaggacctggaggacgggacgtgcagggtcacctactgccccacagagccaggcaactacatcatcaacatcaagtttgccgaccagcacgtgcctggtgagtgcagcagtgcctcggcagcccccctcactacaccagggcccacaggcagtatgtgactggaggggcgtgggccgtgctttcttcctgcaggcagccccttctctgtgaaggtgacaggcgagggccgggtgaaagagagcatcacccgcaggcgtcgggctccttcagtggccaacgttggtagtcattgtgacctcagcctgaaaatccctggtaggggctgtgggaagcctggggaggggtcctggggctcaagcagccccaagaggaggggtggagcccagggctgctgctcactagcccatccccaccctgcagaaattagcatccaggatatgacagcccaggtgaccagcccatcgggcaagacccatgaggccgagatcgtggaaggggagaaccacacctactgcatccgctttgttcccgctgagatgggcacacacacagtcagcgtgaagtacaagggccagcacgtgcctgggagccccttccagttcaccgtggggcccctaggggaagggggagcccacaaggtccgagctgggggccctggcctggagagagctgaagctggagtgccaggtaggcctgctcacaccccgagtgctcgctctcctgcgttggccagggtggggttgggggtggaggaaagagccggcaggcatgtctaccttggctatgcctggagggggccgaggctggtgaagcagccttcagtgaggacaaactgttctcccacagccgaattcagtatctggacccgggaagctggtgctggaggcctggccattgctgtcgagggccccagcaaggctgagatctcttttgaggaccgcaaggacggctcctgtggtgtggcttatgtggtccaggagccaggtactgggaacccggctggggttggaggaggtggggcctgagtgtgggtattggacccagggctggcacagatagccctgcctggcactcactcttcactttgaggtcacagggccacccaggctgttcgtgggaggtgggaggcccaaaggctgatgagccggtcttacactctttccctgcccaggtgactacgaagtctcagtcaagttcaacgaggaacacattcccgacagccccttcgtggtgcctgtggcttctccgtctggcgacgcccgccgcctcactgtttctagccttcaggtgaggcaccgagagaaaccgcccacctggggctcctgggcccggacagaccagagccaccgcagagaccaggccttggccctgtgttcagtgacccccctggcccagctctgggttccaggcctctgctctggccgggtgcagcccacgcttggggtcggcaggaaatatcctgcccaccacgtggagtttttctcgtgtctcaggtctaaaggctttgaacagaagcctgtgccccttgagcaccagggctgcggtttaaagagggacagcctgccaaggctgggtgctgcccacagggtggggcagccctcccttcctgccacctgggtgtgtgcgacggcagagtgtgggggcaggggcggggatgtgcgcctgtggcttgctgccccttgcaaatcagtggctctccctctttaaaccaagttggacgccagatgggtaagtgcgacccgcgggcctcttgctcctggggcctttccgtcctcccttgccctggctcaagcacccccatctaaccatgtctgctgtgcttccaggagtcagggctaaaggtcaaccagccagcctcttttgcagtcagcctgaacggggccaagggggcgatcgatgccaaggtgcacagcccctcaggagccctggaggagtgctatgtcacagaaattgaccaaggtgaggccctgtccctgcccggccgccctgccctgctggctggaagcaggctgagagtacaaaaggaaggtaccgcttctgtaagcagccaagacggggccccaactcctgggccccctaagccaggcaaccctttcccaattggtgacccaagccgctggggatgtggctcgccacccacagctattaggaaggccttctaccctgcagtaccatgccatctccacagggaaagactcaaagtccagcctcagtgctgcccggcccttcagccacggccatggtacttgtgcacaggcctggggcagccttgtgggtaggaggagcccagtgggcttcatttcacggcctagtcctgcccttcccagctgcatgacctgaagcaagttcctgcccgtctctgagcctgttaacatgcaggggatatggtgttcacggtaacctttcttaggaggcagcaaggcctgggtttggcttgtaaaagatttccgtcccaatgcaccctgacggtgggcagcttgagtgtctaaaccttcggccctcaggaggtctgctgcggggtgcaggtgcccagcgtggctgggctcacactgatggaccggcaaaatggggagggccagggttgaggctgttcctcacagacaccatctgctggtttgaggaggggccccaggcccacagcatgactccctgctcctcagataagtatgctgtgcgcttcatccctcgggagaatggcgtttacctgattgacgtcaagttcaacggcacccacatccctggaagccccttcaagatccgagttggggagcctgggcatggaggggacccaggcttggtgtctgcttacggagcaggtctggaaggcggtgtcacaggtaagtctgtcggtgcggctgcacgtgtgcacacagctgctaggcccttgcctccaagctcttggtgacaacaggaggcacctggaggtgacaagcctgtgctgggtggccgaggacagggaggcaggccagtctggctctgcctgacctcctgtgctcccagggaacccagctgagttcgtcgtgaacacgagcaatgcgggagctggtgccctgtcggtgaccattgacggcccctccaaggtgaagatggattgccaggagtgccctgagggctaccgcgtcacctatacccccatggcacctggcagctacctcatctccatcaagtacggcggcccctaccacattgggggcagccccttcaaggccaaagtcacaggtgagcctggggccaagctattggcatctgcccaacgcccggcaccacagccacctcttagccccacccactctgccttgcaggcccccgtctcgtcagcaaccacagcctccacgagacatcatcagtgtttgtagactctctgaccaaggccacctgtgccccccagcatggggccccgggtcctgggcctgctgacgccagcaaggtggtggccaagggcctggggctgagcaaggcctacgtaggccagaagagcagcttcacagtagactgcagcaaagcaggtgggcaacccgggcccccggcccaccttcccaccaaaatgaggccagaaatcacaggatggccagtgtctgggagagcagggaccgcctttggggcgtggctttcacttctagagccacctccctgccacctcctggacccctcaaacaaagaccagggaggagctggaatctgctaagctggcctgggttggggaggtgctggcagctctttaggaagagagaactgtcaccccagaactggcttagggacaggagaggagagcaggacaccagcgggaggaagggggctgggacctgggactgaggacccctcttgcctcaggcaacaacatgctgctggtgggggttcatggcccaaggaccccctgcgaggagatcctggtgaagcacgtgggcagccggctctacagcgtgtcctacctgctcaaggacaagggggagtacacactggtggtcaaatggggggacgagcacatcccaggcagcccctaccgcgttgtggtgccctgagtctggggcccgtgccagccggcagcccccaagcctgccccgctacccaagcagccccgccctcttcccctcaaccccggcccaggccgccctggccgcccgcctgtcactgcagccgcccctgccctgtgccgtgctgcgctcacctgcctccccagccagccgctgacctctcggctttcacttgggcagagggagccatttggtggcgctgcttgtcttctttggttctgggaggggtgagggatgggggtcctgtacacaaccacccactagttctcttctccagccaagaggaataaagttttgcttccattctcctttg

SEQ ID NO: 135 - DNA, 3202 bp, Homo sapiens
agaccgcgagcgagagcgcccccgagcagcgcccgcgccctccgcgccttctccgccgggacctcgagcgaaagacgcccgcccgccgcccagccctcgcctccctgcccaccgggcccaccgcgccgccaccccgaccccgctgcgcacggcctgtccgctgcacaccagcttgttggcgtcttcgtcgccgcgctcgccccgggctactcctgcgcgccacaatgagctcccgcatcgccagggcgctcgccttagtcgtcacccttctccacttgaccaggctggtgagttggactctccttttgccacctattccccgtccgctctccagccccttcccctggtcccagattgcccacggcaggaaaagttaaaaagttcgcgatcgtttgcgggtagccgtttctttaagcactctccccctccccccgaagacgtgtcgggacctcttggtgggagcagccttccgaggtggccgggctggacgagatcagaggctccccgtcgatagggtcggagacccccgtccctcactgcggcagccgcggcgcccctcctgcgcaccgcgccgagtctcacgcgtatcttctcccccttccaggcgctctccacctgccccgctgcctgccactgccccctggaggcgcccaagtgcgcgccgggagtcgggctggtccgggacggctgcggctgctgtaaggtctgcgccaagcagctcaacgaggactgcagcaaaacgcagccctgcgaccacaccaaggggctggaatgcaacttcggcgccagctccaccgctctgaaggggatctgcagaggtaagatgcttgtggtttggcccctttaaaaaaaatactagtccccatagtccagaagtttagtaattctgagaccatgtatggtgatgctttgttgttggtagcttggcagaaaggcacatgatttcagcagtctggaatgcaattcagtgtgtctgggcccaacgaaagcgcatacggaaaagtgattcctgactaacttattgttctggtctggagtctccggggaattgtagggaactttaccataaattgaatttaacagcagaaaatatgtatgagtttcaggcggtggtttggaatcttaactttatccccttctacctttctcttttggtgatctttgcagctcagtcagagggcagaccctgtgaatataactccagaatctaccaaaacggggaaagtttccagcccaactgtaaacatcagtgcacatgtattgatggcgccgtgggctgcattcctctgtgtccccaagaactatctctccccaacttgggctgtcccaaccctcggctggtcaaagttaccgggcagtgctgcgaggagtgggtctgtgacgaggatagtatcaaggaccccatggaggaccaggacggcctccttggcaaggagctgggattcgatgcctccgaggtggagttgacgagaaacaatgaattgattgcagttggaaaaggcagctcactgaagcggctccctggtaagtggagactgagcacttcagacactgtactgagatgcatttctggtctaaatctttgtagaaatgagtgcttgagcctgtttgtgtcggtatgcctctgagaagtcttccctcttatatgtctctagtttttggaatggagcctcgcatcctatacaaccctttacaaggccagaaatgtattgttcaaacaacttcatggtcccagtgctcaaagacctgtggaactggtatctccacacgagttaccaatgacaaccctgagtgccgccttgtgaaagaaacccggatttgtgaggtgcggccttgtggacagccagtgtacagcagcctgaaagtaagttccttcagggacgtgtagactgttgcctggcaggtgggtgggatgtgaacatctttttgaagaaagagaaatatcacccctaactttccttctctcctttctcttacagaagggcaagaaatgcagcaagaccaagaaatcccccgaaccagtcaggtttacttacgctggatgtttgagtgtgaagaaataccggcccaagtactgcggttcctgcgtggacggccgatgctgcacgccccagctgaccaggactgtgaagatgcggttccgctgcgaagatggggagacattttccaagaacgtcatgatgatccagtcctgcaaatgcaactacaactgcccgcatgccaatgaagcagcgtttcccttctacaggctgttcaatgacattcacaaatttagggactaaatgctacctgggtttccagggcacacctagacaaacaagggagaagagtgtcagaatcagaatcatggagaaaatgggcgggggtggtgtgggtgatgggactcattgtagaaaggaagccttgctcattcttgaggagcattaaggtatttcgaaactgccaagggtgctggtgcggatggacactaatgcagccacgattggagaatactttgcttcatagtattggagcacatgttactgcttcattttggagcttgtggagttgatgactttctgttttctgtttgtaaattatttgctaagcatattttctctaggcttttttccttttggggttctacagtcgtaaaagagataataagattagttggacagtttaaagcttttattcgtcctttgacaaaagtaaatgggagggcattccatcccttcctgaagggggacactccatgagtgtctgtgagaggcagctatctgcactctaaactgcaaacagaaatcaggtgttttaagactgaatgttttatttatcaaaatgtagcttttggggagggaggggaaatgtaatactggaataatttgtaaatgattttaattttatattcagtgaaaagattttatttatggaattaaccatttaataaagaaatatttacctaatatctgagtgtatgccattcggtatttttagaggtgctccaaagtcattaggaacaacctagctcacgtactcaattattcaaacaggacttattgggatacagcagtgaattaagctattaaaataagataatgattgcttttataccttcagtagagaaaagtctttgcatataaagtaatgtttaaaaaacatgtattgaacacgacattgtatgaagcacaataaagattctgaagctaaatttgtgatttaa

SEQ ID NO: 136 - DNA, 157582 bp, Homo sapiens
aggttatgtaagggtttgctttcaccccattcaaaaggtacctcttcctcttctcttgctccctctcgccctcattcttgtgcctatgcagacatttgagtagaggcgaatcactttcacttctgctggggaaattgcaacacgcttctttaaatggcagagagaaggagaaaacttagatcttctgataccaaatcactggaccttagaaggtcagaaatctttcaagccctgcaggaccgtaaaatgcgcatgtgtccaacggaagcactggggcatgagtggggaaggaatagaaacagaaagagggtaagagaagaaaaaagggaaagtggtgaaggcagggaggaaaattgcttagtgtgaatatgcacgcattcatttagttttcaaatccttgttgagcatgataaaattcccagcatcagacctcacatgttggtttccattaggatctgcctgggggaatatctgctgaatcagtggctctgagctgaactaggaaattcaccataattaggagagtcactgtatttctctccaaaaaaaaaaaagttatacccgagagacaggatcttctgatctgaaattttcttcacttctgaaattctctggtttgtgctcatcgttggtagctatttgttcatcaagagttgtgtagctggcttcttctgaaaaaaggaatctgcgtcatatctaagtcagatttcattctggtgctctcagagcagttagcccaggaaaggggccagcttctgtgacgactgctgcagaggcaggtgcagtttgtgtgccacagatattaactttgataagcacttaatgagtgccttctctgtgcgagaatggggaggaacaaaatgcagctcctaccctcctcgggctttagttgtaccttaataacaggaattttcatctgcctggctcctttcctcaaagaacaaagaagactttgcttcattaaagtgtctgagaaggaaggtaggttatatttttattcccattctatagctgggtaaagtgagttctaacaaagttacttgttaaaggtcactcagaggtcagagcatcagaaaaaaagacaatcacaaggctgatgttgtgtgctggatagtttaaactgaacaggaagaaaacatttttgtgggctttatctaaaaagaaatagtttgctctgagtttctcagtttcatttattcagcaagtatgtgccaagtgctattgtaggcaatgaagatacagcagggaacaaaacaaaactgacatggagcttccaactagaaaggagaacgagacaacgcgttttaaaatatatataatgtgttaggtaaaaagtgctataaggagagctaaaacacaatgagaggctagaagagtgatagtggcggaggggcttctctgaggagatgacatttgatcaggggtctgaataaagtaaagaggccagttatgtgaatatctggaagactcaaggggcagggcggaaatagccagtagaaaggccctgaggtaggaaggtgtgtggcaagtttgaggaaaaggaaagacagtctgactggagcaaagagaactggagctgaggccatcaaggcagccaggagccaggtgcagactgggctttgactctgcctgcagggaggaactgctgaaggttccaagcaaaggaccgccctgacctgccttaggtttgaacaggatccctctggctggtgtgtgaagaattaactgtagatgggcaagtgtggaaggaaggagagcagtcaggaagctgccataaccatctacatgagagaggtaaggcctcagatggaggggagcagtggaatggtggaaagtgtttattttgaatgttaagcctgcaggagttgctggaggattggacatgggggatgagaaaaagagagaggcttacagatcaggtaatttagctgatcttaagccccttacagcttaatattattccaaggtgccaataacagccaaggtaaacaaccttgtcttggacattctgcctttatttgcccacacaagatgaaattaaatatatatatatatatataatttaaataaataaattatatatatatataatttaaataaataaattatatatatatatatttagtgctgtttccatcagctactagctgagacacttgggcaaatgagggtgatctccagtcctcagtatccttgctgttaatgagagatggtcatttcttctctgcctagctcaaaagaatatgttaaataaaactctgtgaactttaggcagcacaggcttagggcttcttagtaacatcatcagcaccatcagagttaacttcatgagtcagttgagttgcctttggggtatatcattaacagattccaggaagctcccctgcccaaaagcctcccaccaatggcctgccttgttgaaagaattacacaattagcccaattcctttccattaaggcattgtggactccaaacatcctcctttaaaatggaaactaaatcgagctactgtcagtcatttgtccttttaggtgacgttatatatcagatcacttttctgccattagagctagttgaagtttgaatagggaaaaggaacgaatgaacgtggggcagagaacgcaatagtcggtgggttactcagtaggctgtggacagatggagaggatcccggtgggaggagcctctaaagataaactttctatgggaaaatgttgacagatttacctgagtcatggtttttcttacacctcataaaaatgaaggcttccaagggcagctccttgaaatagctgtaacaagtagccacagaagttgagttgcttaaagaaaaacattgaattcatggggaaccgtacgctttaatagcccctttggcttactttgtttaaacaaactcatcccgagcatctcacacttcaccaattttgagtgtccctgctttacctcagccttttaaagagtgtctttcccctaaatatttctggaaatgcctaagggtgctgacgtgcagccagaaatagttcacttctgtccccactatggcaggaatccatggaccaaggctctgatgtttccacaaagatgcccctcaggactagaaatctgtccccatccccgttgccaccacagtcaccatcacctggaaatcctgcaggaccaatgtttgtgaatttggaatatatgctagatgccttactaccttgttatgaccttatttctttatagcacttttaacctagcgcattacatattttaaatgtataattcagcgatccagatcactggtccagtgtcacctcccactcagcaaagtgagatgaacacacttggtgctacattcagctaggctggcactgtagatgcacccagtcccaggtattctagtggctcatgacagggcttcctcactggagacatgctgagccaagcaaggcagtttttaccaccaaccctgatagtcgtacacatattctgctcctccacccccaccaaggttgaaactccgctcctgtcagctttgcagctaccaccaccccctcagggagagtcatctctgttcccaaacccatataaatgtcattcaaagccagaggatgtaattgctgtagtaattgttatagtccactcatccaggggccccactgcaaagctgattaaaccatagtgttactaccttttacagagttattattcttccaaatcaacccactgcacctttctccaaggctacaaaagtgcccctagggtggctgtgtacaggcaagttttgatgtcagctgggaaactacctataacccccactctctgctaacaccaacttttctttttctattttattttattttattttactttaagttctgggatacatgtgcagaacgtgccggtttgttacacaggtatgcatgtgccatggtggcttgctgcacctatcaacccaccacctaggttttaagcctcgcatgcattaggtatttgtcctgatgctctccctccccttaccccccaccccctgacaggcccgggtatgtgatgttcccctccctgtgtccacatgttctcattgttcaactcccacttatgagtgagaacatgcataacaccaatttttcttattggaattgtagtgccagtttagttcttcagtggaagcacttgttcttctctataatctgttctccatctgggaacaccctactttctcagacataggtttgcagtgcattggtgggcaggatttcagtcctttctctgaaagttcctaagccctattgaaaaatgaatgcactggggaagggtgtggcccatctctctccccagaagctcctgagccacatttcttacccagtcccggaaccctggtatcctaaaccatgtctgaacctgtacccctgtggccccagaaagggaccaaacagtacatcccatgaaaccacaaagagatcataaccttctcctctctcctcccacatctctacataaacaacatttatatagatgactgaattcaagatacgtttatttggtactgatggtcaactggaagttcctaagcagaattacttataatgtgggactgtgtttttagtggttgcagtgaaggctcaacacccctaaacacggtgggaacttgctgaggaggcaggctgtgaagggcagggtattagcatctttccttaaaataacatgtgtcttagtgtgctcaggatgctacagtaaaaataccatagatttggtggcttaaacaacaaacatttatttctcacagtctggaggctgtgaagtccaagatcaaggcactgacagatccagtgtctggtaaaggcctgcatcctagttcatagcccgctgtcttctcactgtcctcaagaggctgaaagggtgagagagctcttccgagactctttcataagggcactaatcccattcatagggctccaccttcatgacctaattacttacaaaggccctacctcctaataccatcatattgggggttaggatttcaacgtatgaattttggggagacacaaacattcagtctatataacaacacgtaccgtgaaactttcctactcataaaagtaatatatcttcactggagaaagtaaaaaagtacagaaaaatatgtagaagaaaatctaccatcatctcacatccagagatatccatggtaaatattttaatacaattcctgtgaagttattcagtacacattaatagagtttgaaaacataatctaatataaaagcatgaaattcataaagatattttaaaataaagttaatatgtatgtgtgtatatgtatttttatatatacacaaacatatatgcttattatttttattgtgagcattcccccatattattagaaaaccatgattttttgttctttttctttttcttttcttttcttttttttttttggagatggagtctcactctctcacccaggctggagtgcagtggtgcaatcttggcttactgcaacctccacctcccaggctcaagcaattctcctgcctcagcctcccgagtaacagggattacaggcccctgccaccatgcccatctaatttttttgtatttttagtagagatggggtttcaccatgttggccaggctggtcttgaactcctgacctcaggtgatctgcccacctcggcctcccaaagtgctggaattacaggcataagccaccgcaccagaccaaaaaccatgatttttgatggcatcatcttatggatgcaatataattaatttaaccattcttctactagttaatattaaggtcatttccaacttttattgttgttacattgcctctcattttctttataaatatttggctctttttattttggatatgttgtagctaaaatgccatccagatagtttattctgatttagtgcccaccaggttctaggtgcatgactgccatagcagagatagttgcatacagttcaagtttagattttgtttgtgagcgggagaatccaaagaccaagttcctaatattcttttgcctgaaaaatggctacataaccttgccaaatctcttaacattttcatgcctttgtttctaatatggaaaatgaagatactcaccaatttgtaactgtaaactactacacaagaatgaggtattcatttaaccatatggtgagattttgtagttaaaattaattaattgtgctcagtggtcagactactggctttaaatcctggatccattattcattacttcctattgtgtaacctgggcaagttacttaacttctcttctccttagtttcctcatctataaaatgaataacagaagcacttaccataagtgaggatgagataagatggtggtatatgtgagtggtacacatctgttactattattatcattgttatttattattaagcagtgaatttagactcaatgtgaaatggtttagaagtcatcagcttcccgtttcatgttcttaaagcactggtgataagagtatgcctgtatcatgcagttataactttaatcaaaatatgaaagtaactttaatcaaaatgccaagtcaaattagcaaagtcagcccttttcaaaatgtgtgccctaaagtaataaggtctgcagggtgtgccccagggacctttggtggggagtgggtggtagtcagaatggcgaaaacagtggggatttttagggcccccactcacattgctttgcttttatagcaaaaattgttggctgatgaacaaaatcatttccttttcttggactcacagctagacctaacttcccaagtcctgtacagttaaatgttaccatacaattacagtggagccatatgtgtctgtctcaaccacccaagcctgccattgcagtgtgaaagcagccataggcaatacttaaacaaagggatgtgctgtgttccaataaaatgttaccaaactttcctatagtttgccagcccctgaactagagcatggtaaggcaagagagaattgtagaacgtggttggaaaggcagaaggagtcagggaggaaagaccttgtggaactctagcacaaagtttggattttatcctaaaagcagaagggaagcctttgaagggttttagaaaagggtatgacctgaattacagaagctcagtcctcagcagatcagtatttcaacattcactcaccatgtgaaccattgatcccattttgttacttcctctgtagaatctcctcttaaggaaattgaaagcaagctcctgaatgagatggcattttcagggaaagaccaggaggcagaccccaaggggcttcacaagatggcatttttgtggccttggtggatttgccatgaccttggcttggcaggatcagaaacctgaatctattcgcctgtaagtcctcttttcttgtaagtcctataagacttacactaagttcaggtgattaacatattaagtcaaaaagcccattttagtaatttttaatgaaaaacataattgccacatgtgagaagcccattctattttcatagacatacttatattagaataacaatgaccataatggttagcatttattaacaataacattgtgccaggcacagtgtcaagcattttccatgatgacctcacaagtctatcggtaggaattgtggttaaaaccctcttatagataaagtcagaggttctaaacttataagatcacaatgctagtgagtggtagagatgagatttgaacccacacagtgtaaaccagagtgtggatacctagccactacaacatagtgtctcataggagacatgttcagaaggttgctagtggacattgaatccatgggggaaaagaaggcagaaaaatctgattttaatgttatcaggttaatggggcctgatgcagccatcttgcagaagaacggtattgctagcaggtcctccatgtttgtttacaacactggctacggccttcccactaggatgggaattcccaaatcctataatttcctagatggtgctggaagaggcactgctgaggtttgttttgccaactatctttcccctcttcttcttgccttatttgtcattctatccattaaggtgacttttcatccattttatatgaatttcataattaacctctcagggtaattcccccagcccaccctactatcagggcagtccccaatatgactaatcattcccacatactaagaccacagactgcttcagaatctgtatttatattttcactattaaaaaactatgctatcgtttcctgaaatctctatgaaaaaaaaatactaagctatatctggagtgaaatggtcagtaagaacacagtttgtcacacaaaataatgaaaatgctatttcttacttatagtgcagactggggttcttcctctagaattagaaatattaggcttgctaagatgtgatggggagttcattggggctagtgttttagcttttgaactcttcaaaaggaacagaaatgaagaaaaagacctgctttaataaacaaggttaagtctgtatgatttatggacttatgagcaaatctgacatccactcacatgggtggtcctcccaagggataaacttcgtaaaagcacatttaagaaaaagggagcagatactgttggtgccctcttcaccaggagacacactgaaaggctgcagtagcacatcagagcctcacaggtcagcatcagccaaacagctgttctgtgcatcacaagaattcgtacatatttcaaaatgactaatttgtacctatgagacaggatttgacccactaatttttgtaccgtaacgttttaataaaaattgttttttcaaagcgaagctttgctgagcagatgaattatcatgtgggagtttaaaaattagtcaaaggagtcttgacaactaagtcctttaagcttggccttcccttggcctctgcctactcctgatcataatctgaataaactttaacttttcgactagaatgcaaaacacgtgtttttgtaaaacgaatattaatggcataactcgtgctttattattttagctgatttgtatcaatgtatcaacattccaaagaaaatagggagcatatgttggttaataatttttgttatgactattgacatgtaattcacatgacataaactttaccattttaaaaagtacaattcagtgagtttgagtatgttcttaattttgtacaaccatccccgctatcaaatttcaaagcatatccatcacaccaacaataaactctggttctattagtagtcactcccaattcccttttccctagccccctggcgaccactaattaattatttctctgtctctatggatttgcctaccatgaacattgcatataaatggaatcacacaatatgtagtcttttgtgtctggcaccttccactcaacatactgtattaaaggtttctccatgttatagcatgcatcgatccacacttcatttcctgttatggctgaataacattttgtcctctgaatctaccatatttgtttatccactcatgagctgatcacttaggctgttgccacttattagctattatgaataatgttgttatgaacgttcatgtacaagtttttgggcagacatgttatttctcctgggtaaattcctaggagttgaattgctgggtcatatagtaactctatgtttacctttttgagaaaactgccaatatgttttccacagtgtctgaaccattttataatttcgctggcaatgtatgagagttccactttctccacatcttcaccaacatttattttcctttttttaaaaaacaattattgctgtcctagtgggtatgaagtgatatctcctgtattttcaatttgcatttctgtaatgaataatgatattgtgcatcttttatgtgcttattggctagttgcacatcttctttagagaactatcaggtcatttgcctttttttgaaatgttggttgtctttttattgttgaaatataaaagttctttatatattctagatctagacctttactggatatatgacttgcaaattctaccatttctgtacgttgtctacaatttcaaccattctgtgggttgtctttttattttcttcacaacgtcttttgaagcagaatagtttttcattgtgatgaagtccagtttgactatttttttcttgtgcttttggtattgtaactaacaaaccattgactaatccgagattctgatgtacatacatgctttcttctaagttttataattttagcttttacatttaagtttttaatccattttgagttaattttttaaatattcttttgcatgtagctatccagttgtcccaatgctatttgttgaataggtgattctttcctcattgaatggtcttggtattcttgtaaaaaatcagttgactgtaggcatatgggtttctggactctcaattctacccgactgatctgaatgcctatcctcatgccagtactacactgtcttgattactgcagctttgtagtatgtaagtagtagtacgttttgtgagtcctcgaactttgcctttttttatagattgttttgctattttgagttaagtatttttttaaaacatcaagttaaaaatgaagctgccactctctaaaggaggacaatttcagaaaggcactgagacctgtgcttggtatgtagtaggtgcttttgaaaatgtttgttgcatggaatggattgatttcatctctattctaacactcaatgccatgttcatttcccctttggagcctttcatctctcccttctcttttctaagaaaatcagtaactctctcattcatacattgtacacatacatatctttatttgtttatgtgtctattttccactaattagactataatgccatataaggctagaattacatctaattcattgctgggtcccaaagccatgcttaagaccataagtatataggggttttttttcttttaaaaagtttttatttttaattattatggatacataagagttacagatatgtaaagggtacatgtgacattttgatacaagcatacaccatataatgatcaaatcagggtaactgggatatccgtcacctcaagcatttgtaatgtatttgtgttagaagcattgcaattccactcttagttattttgaaatatacaataaatttttgttaactgtagtcaccctgttgtctactgaacactagatcttattcctcatatctgactgcattttcgtatccattaaacacccctcttttttattttttattttatttattattattatactataagttttagggtacatgtgcacaatgtgcaggttagttacatatgtatacatgtgccatggtggtgcgctgcacccattaactcgtcatctagcattaggtatatctcccaatgctatccctcccccctccccacaccccacaacagtccccagagtgtgatgttccccttcctgtgtccatgtgttctcattgttcaattcccacctacgagtgagaatatgcggttaaacaccccctctttatcccccctccccactacccttcccagaccctagtaaccatcattctattctttctctctctgagttcccacatatgagcaagaaatgtgatatttgtctttctgtgcctggcttatttctcttgcataatgtcctccagttccatccatgttgatgaaagagacataatttcattcttttttatggctgaataacatttcattgtgtatatgtacaacattttctttattcatctgttggtggacacttaggttgattccataccttggctattgtgaatagtgctgcggtaaacatgggagtgcagatatctcttcgatatactgattttctttcttttgggtatatgtccagcagtgggattgctgggtaatatggtagctctattttgttgttgttgttgtttttaggaaccttcatactgttctccatagtggctgtactaatttacgttcccaccaacagtgtatgagggttcccctttctccacacttttgagagcatccgtaattccctgtctttttgatagaagcaattttcactgggatgagatgatatctcattgtagtttagacttatatttctctgatgattaaggatgttgagtatttttggccattcgtatgtcatctattcagatcttttgaccatttttaaatcaaattattttttcctattgagttgtttacacaacttatatattctgtttattaatcccttatcagataggtagcttccagatattttattccattctgtgagttgtctcttcactttgttgatggtttcctttgctgtgcagaagccttttagcttgaggtgatctcatttgtccacttttgcactggttgactgtgcttttgatgtcttattcaaaaaatatttggccagaccaatgtcatctcttgccatatacaaaaatcaaatcaaattggattaaaaacctaaatcgaaggcctgcaagtatgaaaccactagaataaaacaatatatatgtgttggagggagagaagaaagtaatgaagaaagaaaggccaggtgagaaagtaagagagaagggaaaatgaacaagaaagacaaaagtcattccaggcactgttttaaggggcatctcatttattcttacaaccttatgagataagcactcttactttcagtttgttcaggatgctataacagaatcccatagactgcgtgggttataaacaatagaaatttatttctcttagttctagtgactgggaagtccatgatcaaggcactgacagaactgttatctggtgaggacctgcttcctggtttacaaatggacagccatcttctcttcttgctttgtcctcacatggtgggaaggggtaaagaagctccctgaggcctcttttatatgggcactaatcccattcatgagggctctgccctcatgaccaaatcacctcccaaaggttccacctcctaatgccatcaccatggggttaggatttcaacaggaatttggaaaggacacagacattcagaacatagcacccccattttacagataagaacagtgagaaacagagagttaaataattttctcaaggtcatacaacgaacccgtagcctaggcagcctggctctttggtcatgttcttaaatactatgccatactgtctctcaaataaacactaaaatcaagatacttgggatgatcgttgggaggcagagcccagatatctatactttaaacaaattcccaaatgatctgatgggcaactcagatgaaaatcaatgcttcaagaaatagccaaataaaactctatggaaggtaaagatggggagagcttggtgagatgtcatacttgggaggaaaagccagggaaagtaagagaaaactgggtattagtaaagatcatggagaagggaaaacacaagatattgctaggctaaaaaagaggcagacctgatgaagcagtgaacaccacttcagccactccctaccttggccccagctggccctggctgtgactgtgttccatactctgcaatgacatgtaacttccaccacgtccatatcatacctaaagcctacttcagtgtgtccacaaaagcaagtaagaataaaaagtaagagaaacaactcacatttatttgctgcttattatgtgccaggctatgtccttttttttttgagatagagtctcactctgtcacccaggctggagtgcagtggtgtgagcttggctcactgcaacttctgcctcctggggtcaagtgattctcctgcctcagcctcccaagtggctgaaattacaggcacgtttagtagagatggggttttgctatgttggccaggctgatcttcaattccagacctcaagtgatgtgcccacctcagcctcacaaagtgctgggattacaggtgtgagcctccacacccatgtgccaggctatgttttaagtgctctacccatgagaactcacttagtcctcataacaatcctgtgaggtaggtactattgtttccccccattttacagggaaggactctgaagcacacagaggttaaggagtttatcaaggtcactgtagctaacaagcagcagaaccagattcaaacccggagcccacactcttaatcactatgttgcttctagaagaaagaaaataagggatgaaggatagtaaaaacatgcaagcccttctgagccccctgttgttggccccactttggcaggagtgttaggaagactatgggaactcaaaggtgacacttagcactctcctccagaggctacaggagccatcattggtagctagccatttgtatcccccgtgatggtggagaaaagcccacactgttgcaagtttccagaattttctctgctctggaaaagactcccaaactagggttaatcaagtatcttttttggtgaatttcattaaaattaccacataaaaaaagaagaatttgtcctgaattatacatataggagaaaaatgataaaataaaataatttccattatctttgtagcaaaaaaagttggaatgattccaccaggttctctgaaggactttgttttcaaaggagatgttaaaatgtgtaaaatatccaaaggatacacttttgcagctgaatttaggatcttaagaaacatggttttaccgtgtttcccaatgattgttgaaaagaagcagtgactgggttacatctagggcagggtttctcagcctcggcactattgacattttgggccgggtaattctttgttgtggggggctgtgctatgcattgcaggatgtttagcaggatccctggcttctacccactagatgccaataagattctccctttccatctgtgacaaccaaaaatgtctccaggaatttccaaatatcccctagggccaaaatcacccagttgaaaactagtgttctagggaaaaccattataattaatagcatgtctatgatctcccctgttgcgggaagtcagggaccccaaacggagggaccagctgaagccatggcagaagaacgtggattgtgaagatttcatggacatttattagttccccaaattaatacttctataatttcctatgcctgtcttcactgcaatctctaaacacaaattgtgaagatttcatggacacttatcacttccccaatcaatacccttgtgatttcctatacctgtctttactttaatctcttaatcctgtcatctcctaaactgaggaggatgtatgttgcctcaggaccctgtgataattgtgttaactgcacaaattgtagagcatgtgtgtttgaacaatatgaaatctgggcaccttgaaaaaagaacaggataacagcaattgttcaggtaataagagagataaccttaaactctgaccgccggtgagccagggggaacagagccatatttctcttctttcaaaagcaaatgggagaaatattgctgaattctttttctcagcaaggaacatccctgagaaagagaatatgcccctgagggtgggtctctgaaatggcccccttgggtgtggctgtcttctatggttgaaactgtagggatgaaataaaccccagtctcccatagcgctcccaggcttattaggaagaggaaattcctgcctaatatattttggtcagaccagttgctctcaaaccctgtctcctgataagatgttatcaaagacaatggtgcccaaaactttgttagcaattttaatttcgcccccgtcctgtggtcctgtgatttcgccctgcctccatttgccttgtgatattctattaccttgtgaagcgcgtgatctctgtgacccacacctattcgtacattccctccccttttgaaagtccctaataaaaacttgctggttttgcggcttgtggggcatcacggaacctaccaacatgtgatgtctcccccagacgcccagctttaaaatttctctcttttgaactctgtccctttatttctcaaactggctgacgcttagggaaaatagaaaagaacctatgtgactatcggggcaggttccccgatactccccaaagtattgcatggaatgccacatttcttttatcatagtgcttcaaataagtatttcagtgtgttactgaaaatatttataaacaaaatatatttgatagcagggtatgaatatgcccgtgtccttggaagagaaagaggggacaagagaacaggtataacagcatgttgttggtgaaaataaattggtagtaatatagattgaatatcccttatccaaaatgcttccgacaggaagggttttggatttcagatattttcagattttgaaatatttgcagaatacatacaggtagagcatccctaatccaaaaatccaaaatctgaaatgttccaatgagcatttcctttgagcatcatgatagcactcaaaaagctttggattttggagcatttccgatttcagaatttgggattagggatatttgacctatagtaatgccaaatactgcactaaaattagcaaatgtaatctcattgaattgtgacaacagccttaagaggaaacccgatcattatgcctacttagtagatgaggaaacagaggtaactaggtcaaggtcacacaacttggagtgtcagagtctggattctttctagttctgccctcgtccaagccagttctgttaacactattcttcctttcagcataatctgtgtcatcactggagcttatgtctacctgcctgccacccagcaccaactgtttaccctttaagtctcattctgcctcctccaggagccttccctgacccctgccttcaccttctgacctgtgccccttcacaccctgtgccctcttaactgggaaagccctgagggcaggggccataccttatttacctctatctccagctcactgcacagaggcattcagcagatgaccagtaaatatgggctgtctagtaaaaactttgcagttagagataatgaaagaaacataattacttctgtgtgggttgagaaagaagggaagggaaagtccagatacttaagcagaaaaaggcaaacagtccaaaaggggaaaagtaacttgcccaaatcatgcagttgagggcaggaagaaagggggacaaagccaaaaccaaaacccagtcccttgtcccagcccagtgctttgtctgctacgttacacaaactgtgattgtgaaattaaagggtttttgatggcactgatataagtaaataaatggctttatgagttaacacatgacaagcaataaactcataaaaggtaaatattgacaactgaagattatatatcactatgtttagtgtgtggagaacccaactaggaattaggaaagcttgcacattcagtctggtttcttggcaaatcaatgagacttcaaacaaatcattttatttctctgtgcttctgtttcttttggctgtagtattttgctggttaaagagcacgtgatcaatgtctatgcttttaaatgtctgtctttatttgagcatgctcagctggatgtggaaaacctatggttctcttgggtttcataaggatcaaatcccacagtgatatgtaaacttgtgtggtttatagaattataggacctcaaagctgggagaggcctgataaatcatatagtgaaaatttccagccagtgcctggatttcttttacagaatctttcttttattggacaggtgctcccttcacaatccatgatgtaaggagaaaaggggcttcgtttgaaggaagttagtgtattgtgtatgggcgtgtactttctgcttggggtgtgcctacagggctatctcactttctgaaagcgtaataataagttactttaccatgcattaattaaatgtcagagaccatgctaaatgctttacagagaatatcttttttaatctgtataagaacctcctgaggcagataatattattaaccttacttttcagataaggaaactaacattcagaaaagttaagtaacttgctaaagacatgtgtctactaggaggtagagtctcaagtctatttcaagctcctaataagtaaataaatgtctattgaatccaactaatgacatcccactccatattcccctgccactgatgagagagagaagtataaagtttatgtaaataagacagaagcaatgttttatataagcattgtggatttaattccactaagggattgatttttcatcttaatggaactttttcttcagctatcaagtttcagtttcaagatcgcaaatgctaagaagatattaaaatattttaatacataattccactagatcatatttataggtactgttaatatattaccaaatctactataaacaaaacaataaaacaaaaggctggatcaatatggaaagtagagtaataatttaggccctaaagaaaaactacgtaagacatttcttagaggattaccaggtttctctctctctctctttttaaacacagcctaaaatagaaaagcaatttatgtattaataaaaaaaatagaaacctgaggcagatgtaaccagaataggtgaattaactgaagactgatattcttatttatgtttgtgtattttaaataaagaaggagtttgaccatctcatctagttaatcattaaaaggaaactcgagccaaacttgtgaagcaggtaaagtttatttttagacattcaactggcttctcttttgggctccccttttcttttggggtcatcctccatgtctggtaaccttaacctccctgtctcttccagaaggagcaacacccccatgttttagacctttacttctgatgtcaggaccctttctgatgcaagtgttagctaactccagctggctgaagaggaaggaggaggaagagaaggagggggaataatgtattgaagtgtgtaatagtcaagtctaggagcagccctcaccttaggatctagacattcatattatataattgggaatctatttccagatctctttgctttttttttttgcaaacctcaatccaatggagtctctaagtggtagaccacagctgctccaagcttgcatcgtatcagcttagctattcctgttgagaaacaagacaagtttccaagtagtcccagaaagccaagaattaaggtgtatctgtccctgtcatgtgcctatctctgatattaccagacctggcccatgcagagttacagatgggttaataccaccataagcgcatggaccaaagttagggaaaggatagttttccaaaggaaatgttaggtcctagtatcatatgtggagaggggatacttggcaagtaaaacagtacctatctaccatgtggccacaacagggcagatcagggtccctggtaggatggaggcagccatcaagcattatggtatccctgaataatcccttcccagttcatatgtaaaccaatcctcttaaattgttaatgcatttaacataaggatggattcagcaaaactgtatcaatagcaaaacatgaggggtctccagctagtagcctgtcctgcatagccatccatgactactgctctaattgattttttctagaatgtctaaaggaagatgaaagtagaaaatgagctgtagtggacaagcatttttaaaatgagcccaataatgtagcacttttgggtgcttgataattgttgcaaatcacatttgcctgagaaatttcaattctataataattgtacaatagcagaaagatctagatacaaaaatattcattgcagcatggcttgcaatagtgaaaaattgaaaacaatttacatatacttcaataaggaaaggttaaaacaatggtatactatgctactattacctgaaaatattgaaaagatgaaaagatgtccaataacatttgatgaataaaggttgaaaaatacatgtagtaaaatctcatttttgtttttaaaaaacatatatgcatgcatgcatccatgtatagacaaaaaggatttgaaaatatacaataaattatagttaatcacatttaccttatggtactgcagaacatcagaactcattcctcttatctagctgtaattttgtaatcgttaactaatctctccccatcctccccttccccctgcccttcccagcctctgatagtcacaattctactttctatttcacataataaaagtttttaaagaggggaataatggggtgggggatctggaatatacataaaaactcaaaaataattacaaatttgttgccatcaaaatataaaaagaaaaaaatagttacatctgcaaaatgggattgtgtgaggaagtttttacctttatacatttctaccttctgtatgtttggatttttacaataagtatgtgttattttctagcatcttttgaagtttttttcttaaaggcataagtaatatctaaagttatttttcatccttctaatgccgtctacacaaagataacgatttttcttggatggccccaatctctcttctgtaagatctttccccatttgtcatatccataactcataacctcctcacccttcactgctctccattttctctataaagtgagcccagtcagtacttgtaggcttgttaagcattacttctaataagaaagactaacttgtaaagcaaatgtggaaatgtactaatatagcatcaagcacaaaatagccattcaataaccgaactatttaattccttttttttcacacttcatcctttccctaattccagaaagaacttgaactgggtcataacaaagacaaatttagacagacagataaagatatctcataggtagaaataaaactgagtgattataaactaatcacaggaggctctgttagtctgatgaacagaaacacacgtgataaaatcacagagaggtaaaatagaaaatgaaaatcaggatcaagaaaagggaaataaaaatatgctggacatcattcaataactatttgctgatggtaattatagggatggaaaacccatcaggcctatggagctaaaattaatcagcaagtattcacagagtgcctactgcttctattactggttctggcttcctgcctgcccagtgcagaggcttgagacatttgcgtgacattcagcttgtcaagacagaaggagcaaaataagcagacagaggctcactgcagccgcctatacccatcatattgttggaatcatattcaagtgagacaaactccttcagtggaagacgataaaactagcttaaaagttgtaaacatcacttcatcacccaaaaaaggcccaattaagtggagatactatttctgcaaagcaatcatcaattcatttgtgtaacatttgaaatttcaaagtacaaacccacattctattaaaggcaggaagtgaaaccaataaaacttgtaacaactatacttaattttcagggttctttccattgctgacaaacattttaagtcatgtctattctcttaaaatgtaaaatatgatgtttatgtcactgttaatattttgataaaaagctattgtcatggacatctgggtttttttctgcatgcccagaaatcccttttctcctatttaaatttaaaatctccaattatttggagaagcacctcctcttctctctctttcatttgtaccccattcttaggtgtcagtggtgggcacttgagctaggctttgcccatcatagtacacattcctgacatcccttggtcatagttattggtccagggataagcatttgaaccaactagaccagtgaaacccctcccaggaacaactactaaaattatgggaaaagaactctttccactgaagttactaacctggcaggatgtgttaaatccaggtgccacaggccaccaggtggagaggtggagataatctttccagaaaacaaaacaaaacaaaacaggaaaatgaagctaagggataaaatttaagccctttggacttcatttgagcccctgaatccagtcatgcctcctgaaattaaacttcccctggacttttcagtgaatcaaaaaactctgtttttaacagtggggtttcttataaatgcaccaaaaaatgacctaatgaatgttgtctacaagcttccattagaagtattatcttcaagagaaaaaaaaaacaaataacttgaagaaaacccttcataattcaagtcagtcctgctaacctctaggaaaccctccgtgaccaccatctccatatccacacccattttcctaaccttaaacaccagatgacttcttgaagcttatgaagtgccctatgcatctaacacatttctgtaagtctgcattgttctataatgacttgtaaccgtatctgtctccatttcctccagagaagagattgttatcattttgatatccctgcagccttatactggggcctaacatataatagttgctattttgttgaaggaattgtattttgttgaaggaattctcttttgttgaaggaatgaatggagagaatattaattaagaaagtctcttctattaataaacattccctgattgattgaaaccatgcctaaaatagctaatcatcagaagaccaaagtaaacaacatatccaaactgaatcctcaaagtgttagtcattggtagctgtatagctgagaatctttccttcttctggtcattagggttgaaagggtgggtgaatgtggagacatgattctttcttttgcaaaacatttactattttttaaactccataaaatgtaataacttctcttgaaaaatgttaaaacccaaacaaaaaaacctgtaatgtggaatatagattgtaggttataatggaggaagcagggaaagtggggaaaactgtggttgccagaagttttctgataactaataggcaagacaatagggtggcttttggtagggtccttctttatggcatagcaaagaaaaataggaatgaagaagtgagaagcatgaaaggggacagcaatatatgtgtaacacagggtgattcagtgtgagagttttataattaaaattgccaaatgtgagaaaaaaaaatctactataaattgggataggctcaaggcatggagatgaacaaataacccctccatgtgggcaaaaatcaatgaaattactagatgagtagcttagtatgtgagttccagttgcaacatgttactggtatttggggcttcccctcccccctccccccctgcactttgaggcaattcgacatttgactaacaatccagcctaactttctccatctgatataaagatatttaccttgaaatcctagaactgccaacatctcctacttcctactacaaccctccctgactccttttctctggcacagctttctatgcactcaccccattcaactaagcctgcttactcttcaccagaaggtcttctcttagcataaaaagttcctggaagtccatctctttcatagagctgctggatgactgctttgcttacctttggccttcaaaatacctctcctgtccaaccatagctccccagctcccctgccattgcaaccaatacaaacttcgtcatctttccttgggccaatgtgcctgtctcctcactgctctccctgctttctcccttagcccctacaactcatactccacatcgcaagcagaacgagcttttcaaatagtaaattagattatgtccattagtgtgttagtaaatgtttaacagctcctgaggggaacagagtatctatgtgttttataatttttacatatatgtatcacataatttacaaaaagcaagaaaaaatataacactcttaatagtaaattctatatggccatgtgattttcacagaaccatttcagtgatttttgcagaatatttgtgtccatagccaacctacagctaaaattcaaacacgtttggcaaaatcagaccacaaataaatatctgattaatatccaatcagcaaagaagtcattcatggtactgaagtcccaacatgaatgttggttgatatttttacattaatgagcgagataaaagtgaagcaacaaaaatggatgttggaactaaactcgttcattaatgacagaagtgacttcttttgctgataatagctttcaagtactagaaaaatatttcctcaagtttttgtgttcacaaactaaggcacttttaagttcaatcttcattattaaaatttcttctactctgtcagtctagacaatcaacaaaacaaatcaagctctggtttgtcatgtttcccaatttctatagtataggtactccaccatggttgatttcaaactaccaaaataacatttctgaatgcagcgttaggaagggatacgctgcatcataccatcgtatggtatgttcttatacagaacagacagaaataactttaagaacatagataatagtaaaatggagtaaaataattaggcagtaaagtcttcagcatttatttttgttgttaaaatatttgattgtgagtttataaataatttggtttttaataatgactgtgattaacaaccaacttacaaaatctctgaaaatttaacagtcagtgcttgcaagctggtacaattgtttccggtgcactactgaattatcactcccctgcctaaaattccagactgcccattgcactgattccctgggaaataagtgaaaagagacaatgataattttcatttttgttgtggtgaagtgatagtgcaaaaattccataagctcctctaagttttccaaataaagcttagtgtttaaaaacgtttgaacacatgatcccatgtaaggcctacattacttcctgtgtgataggtggggtagatatcattatccttcctttacagattgaaaaacaaggctgagaaaaatcaaatgcctaccccaggctcattcaagtaagtaaatggcagaatagggtctaaaaaccaggtcttgtattgaaaattcaacaagaggatagagaaaatttaattgacaaatactgatctcaaaacaatttttttttcaatggtgacaaatgtcctttgtagcactttggagtttgatatgaagtatcttcttatcttgttaagggatccctataccaagaatgttttcatctcaaccccactatttctaagttagcttaaaaacaaaacaaaaccctgtgtgctctaataagaagatataagaaccaaaatggaaatgcaggttctcaaatgagctgaaagattccacatagcagcggggcagattgaaacactctttaccaaaggaacatgggagagaaaaggagattaaatcaagaaaggaagaaagctaatgacatatgaggagccacaaatgccacaaatgaaaaaacaaagtacgtaatacttgttgcaattattcagtgtgcttgctctaatgcctccaaacattaaaaacattgagttcctgcttatggcaacatttatctcatttatctgctgatagctgcctcatccttgaatcaggtattgcttaaactaagttctgccagcataaagaataaagtcaaccaggacacccattgggcatttcacgcatatgagcacaaattgtgatattttaggttgcttatgatgaaatcattgaaagcatcatgaaagacagcaaaacagcaggaaagctagtaataatttagcatttcccagtccaggcgggaatgttaattctaattacaacgaggaataccaaagtggagttcattatgattaagaacttgctgtactagtgtgaattgtttataataggcatgtctggcataaaatacaaatattgaagcagacagagatggctcattcaaagctcagctgggttcccttgaacctcttaccttataaagttaaataggaatagaagtattttccaaagtcaagatattattttaaagagacaaataatagctatgatagctgcaggaataattttttaaagtaagttctaaccaccaataaaagctgtttgtgtgggcttaacatgttcaaaatacacaatacacatgtacacaatacacgtatacatggttcccatttatatttaacatcacacatttaaagtgagagagtacagaaaaaaagaataaatggaaactgaagccatgacaaagaatcacggactataggaaaataagtcacaaagaagtatgcttatgtaagaggaaatatatgtgataaacaacaggagacatgggaatgaatgtggtgtcttatgtcctttctttaacagaatcgtgtaacagacactactcaatatcgatctcaactgatccagttctccagtctccctggaaaacaatggattgatgcccagggtgcgctgaacactggaaccatggtcacttctgcacttcacacgattctgctcccaccagttgagctaccaacagttcctggtgcttttgcttcccaaacatgtttatgccatttgttgcttattactgtacttacttaatttgattaaatattaagtaaaatgatgaaatgagtgtaaaaaattgttctataaaatctaaatggaaagatgccctatagccttccttgacttacagttgcgtcaagtaaggtggatgtaagacaattttaaaagactggtgtgggggcaggagtgaggaatcataaaaatttagaaatctgcacgaaaattattctaaaagtacacattgaacatccctaacttgaaaatctgaattttgaagtgctccaaaatccaaaactttttgagcattgttatgataccacaaatgaaaaatcctacatggaagtacttaccacaaactttgcttcatgccccaaattattttaaatattgtataaaattatcttcaggctataaggtgtatatgaaacaaaaaatgaatttcctatttagacttgggtcccatggccgagatatctcattataatgcaaatattccaaaatcagaaaaaaaaaaatccaaaatctaaaacactttcagtattaagcatttcaggtcatggatactgaatgtgtatctttaatttcttgttctactttgtttaaaaaaaagggggaaaatagtaattctacagatgaataataattgctaatgatgagcaaatacttcctatgacccaggaattcgtctaagcacttcacatatatcaaactggtttaatctttataaatcagtactattattatccccattttacagatgatggaaaaaggcacagagagttagcctgcccaaggttacattccttttagtggtggagactgtatttggcctttatagtctggcttttaactgctacactatatcaatgcattacaggtatagtttatacacacactaaagaagacatggaactccagtcagtgggctcataaaagctttagaccttcatcaaaagattagaaaataaatgttcaatcacaggttttaggtttcaaaagtttcaaaagtttaaagtttgcaagttatctttcttaaaattatttccttcttttaactaatttttaaattaaactccagttcaatcacatccactagaaggcttcactttctacaaaggggtaggtaaaggtgatgatcttaaataccatactgggagttgggatctgtgtagcactagaatcaagagttattgtatatacttgagaaggagcacagcctgatttagttgatgttttggaggggtaatctggcagtacagcttggattattttagtgggaatggagatgacaaaacatgaagagaatgggagaactcacttgggtaatatatcagtttctgaaatcaatgtatcaagtggtttggttattagtcaggcttaaggttttattggccttaggacatagtctctaagaccatatattatcttcattcattcatttaaccaacacccactgagcaccaactatgcactagtgatacaggggtgaacaaacagacacagtccctgcctttgcagaacttatgttctggtgggtgatacagagaaataacaaatgagggcacaaataatgaactatcattgtaatgtgctaacaaagtatgcagaatactataagaacatacaatcaagaatctaatctagtttattttaaaaaaaagtggggggagcactcagatgtttaaacacaaaacaataaaaatgaggatcttgagggttatctgtacactttttattaacccatttggccacaacaataacccagtaaaagtgattttacatctagttaactagttgactcaatgttattataaccctgtaatgtatttgttgggtgcctgctatgtagtgggctgtgttccaggagtgggacataaagctatgacaagatagatcaggtccttgccttgactgagtctgaatacatcaccttcatttccacctctgcttctaagacaatcaaataccttcccactcagatagggattcatcctatttcttgtagtaattataagttcccagggttacagattagtaaatgccatacctaaagacttaggatactgtgcataaaacactttcaatagtgtctgtcagacagcagatgcgcaataaatgttgactttcgttagaattgtgttattattataatgctaaatctcacgtcctttctggcacactggagttcatctcttcaattaaattccgtaagcacatattgtaagtagtctatcagaattgatatactacttcatgttaatgattgagatcagtgaggaaaaccactttaatattgtctaattcctctcttaatgcataggagccatgtgaacttagacaagcatcaacctctgtaagcctgttgtcctcatattgaaaaatcgaataacaatacctatctcatttaattgttgtcagcaaaagtgggcagcagaagagtggggatcaataaatgttagccacaaatcataactatttgtattactctgaaaaagaggggttaacttatagttcatgcatgcttccaaatgaatgtgaaagactaaagaatgagaatttttttgctatcaaattaaaaaattaacaggcacatttagattgctgaagagagaaattaggataagtttttttttttttttgctcaattaaaaacgttttcaatggcatatttaaaactacgtattcttccccattaagatctgcagagaaaaaaaaatgaagggagaataattgggaactcttgtgaaatcataaattatttaagcagagtacctaccactaaggatttgagcatgtatgagcgatgaggtggattcttagagcagagattcagcagtgagacaggctaatggcatggggagatgtgttctattagacaactgtattgtccccttaattatatacatatatatgtatataatatatatgtgtatacatatgtatacatacatgtatatataaatagaattcttaatcattttaagcagtgtacaaggataattattagcatgggctatttaactcacttttaaaacgtgtaaaacattattgtagggttgggtcttgatttgtttcccatgaaactgttggtagtttaggggccaaattaacgaaagacatctcattctagtgcttgaggctcagaaattggaaaaacgggcaactaggtcaagcagtgttctcatagcctcacagatgagcatccaaagcaagggcctccttctagttgacttgtgccaagggacaggagaagcggagtctgccttctgggtccagaagggggttttgttaacatggagttgctcagcgcccttcataaaaattcttctggctgagggttctacgttggcatacggttggttccctcttcttttccgaggtggcgagtatctcttcctttgccaagatggcggctccagaatcctctggaggcggcccccgtagatcgtctccggacaagaggcttgctgaaagcctacttctttcctttcacatcagacaatgcacagggaaccgtttacccttgagaaccaaggaaggacggcttaggctacccgcgatcgcgaacctttgccaagatggtggccgcggggacgggctggcgacactgtaccctaccaagatggcggcgggcggcttccgggacgcgcttccccaatcgtcttcaagatgtcagagcagggggagccgccgtcagtctgagcgcggcgggaggtgagagagtggctgtggccgagcgcccgagcaggattaggtggagctgcggcagcccccgcccgtgtcaggagctggcaagcgatgtcacctgtgggggcgcaaaagttacctccccaaaccctaaacccacacagcacaacctttcccagagtcacaaaaatcataatctgtgccgcacaaggtaggaggctcggtcccggcatcgtccaagccttcccgacgcggcgagctggggaagggagctggggcgggggcttcccgcacgggcacccctcgccccacggccctctcctttctcaggacggaccacgagttcccttccccttggactgagggggaagctcctaacaggaacatctgtagggagttgaacgctggcattttaaagctgcctgtattttgttttatttgtaggggcaggggtcctatgaacgtgatagggtgagcaacgcacagagtcgagggcagcaaatgtcaagattcgggggtggggcctgcaccgggaacttggacgcgggccctggccggggtggaagaagaggtcaggagtttcggaaggggggctatatttcgccagcaacttactatttcgcctgcaacttgcttttaagcctgccgccccctgctttccttaatcataataataaaaaaaaagtgcaaagaaatccagctcgctggaggttttgcatttggcgtgcaacttccttcgagtgtgagcacattgggcgggaggggtgggggttgaacttggcaggcggcgcctccttctgccgccgccgccgcctcgcagactcggggaagagggtgggggacggtcggggcgcgggggagggtgggttctgctttgcaacttctctcccagtgcgagagcgcggcggcggcagctgaagacccggccgcccagatgatgcggtggtgggggacctgccggcacgcgactccccccgggcccaaagtacgtatgcgccgacccccgctatcccgtcccttccctgaagcctccccagagggcgtgtcaggccgcccggccccgagcgcggccgagacgctgcggcaccgtttccgtgcaaccccgtagcccctttcgaagtgacacacttcacgcaactcggcccggcggcggcggcgcgggccactcacgcagctcagccgcgggaggcgccccggctcttgtggcccgcccgctgtcacccgcaggggcactggcggcgcttgccgccaaggggcagagcgagctcccgagtgggtctggagccgcggagctgggcgggggcgggaaggaggtagcgagaaaagaaactggagaaactcggtggccctcttaacgccgccccagagagaccaggtcggcccccgccgctgccgccgccaccctttttcctggggagttgggggcggggggcgaagcgcggcgcaccgggcggggcggccacgccaggggacgcgggcgtgcaggcgccgtcggggccggggtggcggggcccgcgcggagggcgtgggggcagggaccgcgggcgcccctgcagttgccaagcgtcaccaacaggttgcatcgttccccgcggccgccgcgcggcccctcgggcggggagcggccgggggtggagtgggagcgcgtgtgtgcgagtgtgtgcgcgccgtggcgccgcctccacccgctccccgctcggtcccgctcgctcgcccaggccgggctgccctttcgcgtgtccgcgctctcttccctccgccgccgcctcctccattttgcgagctcgtgtctgtgacgggagcccgagtcaccgcctgcccgtcggggacggattctgtgggtggaaggagacgccgcagccggagcggccgaagcagctgggaccgggacggggcacgcgcgcccggaacctcgacccgcggagcccggcgcggggcggagggctggcttgtcagctgggcaatgggagactttcttaaataggggctctccccccacccatggagaaaggggcggctgtttacttcctttttttagaaaaaaaaaatatatttccctcctgctccttctgcgttcacaagctaagttgtttatctcggctgcggcgggaactgcggacggtggcgggcgagcggctcctctgccagaggtaagaagcgaggcgggagggggccggggcgcgctcgctcccccgaggtgccgctgggaccggagacaactcgggggccgccgcgggagcctacaaacttttattagcctcggggagtgggggtggggggctggcaagggccgggcgacggtgacgaaagggcagcgcgcgggtgacagcgctggcctcttcctctccctccgcaggcgtcccctggccgggccgagggggaggaacctgacctcggacggcgagcggagccctgtcgaactgccgggggcttcgagcctctcattcctcgcgggaatcctggcctcttttctccccctagtgtcccctttccctccaagggggtcgcccgacacccgttttcgtggtgaacgctaagccgcgtctgaattttactcgcccgaatatttgcacgccaccccggcgcgcccgagcgcgagcccgggctccggggaggccccggcggcgcctggcttgaggagggcgtgcggggcgcgtgagggtgcacacgcggggggctgacagcccgcaacttggagactgcggccggggccggcgttatctgttagaagtgggcgtgtcggagagagaactcaacaggtctggacgtacttctcttttaacctcgcacttttttctcttctccacccccgccccgcaagggcttgctctttagcgtttgttgttaattcgcgcctgaggtttctaagtggccccttttagaaaaagaccccctgtaaccgtaatggttttgtgctgcgatttttacaagtgctagtttgacgtttggggttgcagacttgataattgcaaccttgtaataccacttaagaccctctggcatggttcattagggccaattaatgtggctgggttatttgcaacttaaactgggggataatgtcgcttgagggagcgttttcgttttaggaaatattgttttggtttcgggtttgaaggcagctgtcaaaaaagcggcatggaaattcattgggctccattcgatacctcgtgtttagagatcgttatcgcctcagataaacggggcagagaggtggggagataagcagtttaccctcaagatttgtagtggcaagtccacacccctctctctaccttcatattcacttttcagtgagggccagtgacatttatgctgcctaacgtcatcgcataggaaaagttaccttttattggacgggatttgactatagtgtcccaaatgcgcttctccgtcttagcccatctcttaaaacaccctgattaacgatatactaacagtcttactctcttgagaataggctgagaattgggataggtgaaggtttggataggtgaaggcagagaaaattattttgaacattttactggatacagttgtacctgaatttatatgaatgtgattttacggttctgtgtttttccatttttcagtacttcgatatttgtttggaaaggaaagaacttagagatgtaatagcatttcatattgaggatctcaagcaatgtaaacaaatgtagcttaatctagatgtttttgtgagttatgataagggtcagctatatttaagttatgtaagctaacaacgtagtgagaaactactacaccttctcttctgctctttaaaatctaaattttagttggcctatataaagtgtatctcatttcatatatccaaaatttggaggtaggcacatccagtcagaagtatgggttaaaaagccttttcccagcctgtcggaagataagcagatcagcattgtttatttttcaaagaaaacgtgcatggttcaccagttggttgtactcaaaggtttggatgtgtgactagctggtaggagggaaatttggaagtaattagggattgagaattctagcatagtatttatcaaatgttatatgtattggttctcagaaaagcaaacagccgtgattgaaaagaggtaggaattttaatgatcacacttcctttttttgaaattaaatactttgacatcaacttgaaccttcagaataatcagatgtaatgaattataatgtctgtgattaacaaagctacacgttcagtgagcggcaggatgaatagccaagcttagttcgatacacttttgccctcagctgtgcaaatggattgcattgtacttttaaatgtggcatgctgaatgggagcaggggacatggctttttattctggaagatagaaactactcttctggtaacaaagaatttgattcggagttaactaaaaggttcatttaacaagctgcctcttactaatcggatcaggaagataatgtgactttagagcttatgatgttttccccccgtttttgttttttgttttgtagttgatattcactgatggactccaaagaatcattaactcctggtagagaagaaaaccccagcagtgtgcttgctcaggagaggggagatgtgatggacttctataaaaccctaagaggaggagctactgtgaaggtttctgcgtcttcaccctcactggctgtcgcttctcaatcagactccaagcagcgaagacttttggttgattttccaaaaggctcagtaagcaatgcgcagcagccagatctgtccaaagcagtttcactctcaatgggactgtatatgggagagacagaaacaaaagtgatgggaaatgacctgggattcccacagcagggccaaatcagcctttcctcgggggaaacagacttaaagcttttggaagaaagcattgcaaacctcaataggtcgaccagtgttccagagaaccccaagagttcagcatccactgctgtgtctgctgcccccacagagaaggagtttccaaaaactcactctgatgtatcttcagaacagcaacatttgaagggccagactggcaccaacggtggcaatgtgaaattgtataccacagaccaaagcacctttgacattttgcaggatttggagttttcttctgggtccccaggtaaagagacgaatgagagtccttggagatcagacctgttgatagatgaaaactgtttgctttctcctctggcgggagaagacgattcattccttttggaaggaaactcgaatgaggactgcaagcctctcattttaccggacactaaacccaaaattaaggataatggagatctggttttgtcaagccccagtaatgtaacactgccccaagtgaaaacagaaaaagaagatttcatcgaactctgcacccctggggtaattaagcaagagaaactgggcacagtttactgtcaggcaagctttcctggagcaaatataattggtaataaaatgtctgccatttctgttcatggtgtgagtacctctggaggacagatgtaccactatgacatgaatacagcatccctttctcaacagcaggatcagaagcctatttttaatgtcattccaccaattcccgttggttccgaaaattggaataggtgccaaggatctggagatgacaacttgacttctctggggactctgaacttccctggtcgaacagttttttctaatggctattcaaggtaagatcagtgtttttctgtttcttaagaatggtacatttaaggtagattaatagatgtaaatcttcattgatttatatgtgttctctaaagattcatgtgcttttttatatgaataagtttaagtggccttttgaaagtaggaaaggtagacaacctaagtgacatctgtacgtaaccatttcaggttttttccttaaatagtggttttcagtatcccattggccaacggtgaggattttatttaacatttttaaaataatgttgctcattaacagatatcttaacgaaaaattatataaattcaggagagtataatgtctcataatatcatattgtgttgtgcatggtcattcagctgttttagaatatgttcttatattacaataaatgatacccttacttacatagtcaaaagttgtgctgccttatttgtaaattcgttaagtgttagcttgagattaaagagttaaaagcagaagtactaacaaagagccctattcttcaaactgaatcttctgttaaagaatttgagttttgaagttgctaaagcaatgcagtgaacagtgtaccagaccatagtattagacacaggtcttgctcacagggttcttgccataaagtagacaagttatgtctgctgatcaatctctttaagagaggaattggtgtcaacatggtgcaaaacaaaattttacgttcaaatgttcctgcaagttctcaagtagataactgatggccaaaattgttaagcttcaattttcagctttcgtttgatttttctcttttttttactcagtcgtttataagcatactgatatttttgtctgacccaaaaaggtcagaaaatggaattatcagaaaaaagttctaaatgtagatatacgtgttggtaggggtgaatttctctaccccgtaacctcatccccaattcagataaatgctaggttttatatccattttagttgtgaaggaaaatataaaaatgtggattgtagtgacacaagattgattaatcagcgggtttttttaaaagaagacatggtagacagtgatttatttgtatgtaactattgaagttttttcttaaatgttagtgatattcatcgttcccattaactagttattcagatttttgaaaatcctttttctgtgaaagctatcctaacctggaggatgtctcttttctttcctctgtacttaagaagcttttcttgttagggaaataatttagaattagatttaggctatgttctgttcttctaaaaggcttagttgtcaaaaaaaaaaaaaaaaaaaccaaaaaaccttggttcttacatgtcttaatgtgaactacctcctaatctattgtttaaataattatcctttatttagaagaacactacttcaacctgagttgaaggtttaaaatcttttcagtaaggagatttgagatctttattattgcataagctgttgtgttttaaatgctaaaagacatgctgtgttttaaaattttcaattgcaaatttttggcaatagaattcgcatacttggttttcttaaaagagttaagtacggttgatttgactaagctatctgtaggaaactcttaaattgatttataaaacatgtaattatacaaagaaaaataaaacatcttaggaaactcttggggattattaatggattttgccctgataatcatcatggcatggttttcattttccttactataaagaaaaggcaagggacaaaacttattttccatttgctatgaacttttaaaccctataaaatctgggatatagagtataagtagatgaacatagttactcttaaatcactaaaggtgattttaatgctttaacttttatagtacttcatgacataaagtatctttacgtatttttaatttgggtcccataaccttatggaggtagtaggcaaggcaatgatgatgcggctctttagaagttctttaatatcaaatgaaattattatttttatgccaatctgtgattgggaaatataatcagtagtctgtgtcctaacaagaaggtataatactttatacagggtattttgttaatatttgaagattttataccttatggcattaacttagcactgggaactatgattacccaaaacaaagcttcatccaaataaattgaaacagtgtttcttttaaaccatcattgaattagtctattgtttccaaacaacagccctgatatagctaaaattagttgctttctcttctctatatgttacatgactgtagccaaacatttgctatgaccagtgaccctgagtgatcagcaaataatcaacacattgagaccacaacttgaatactgaccttctgactttacgaagaaaaatattaaatgccactaataacttgaattccttttaaattaaaaaaagttataaattgcaatttgactttttaaaatgccacctaaaattgtttttatcagaatacttaaaaaaaaatcctcactttattctctgggggtgggaagaggcaattccttccttccaccacaacattgaattatcacataaaattgtaaaattatgaatattatgattgagcttagtaaagcattttctaagttcatttatagtaaaacaagagaaaccttattctcaaaatctattctttaagtaaaacaaactagtcattctaacttaatatgcttttaaaaatactgaagttcagtacatttagcataaacttattgacgaaggcacatttctgcattatttgattttcagccttgtttcatttaagcattaatgacagaggtagagaacagaaatggttttaggtggtattagagcttttattgggattatgttgaaattttagtgttaaaaaattgttcgtatcctgaagggagggattattggagagaatgaatgatgtaggatgaacttgtaaattcagttttcggcagagtctaaaattaagtgatgattggcacttaatgaagctactaaaatttatgtagattttaatgtctcattagtaatcgcatctgtatctggttttataaaagtaatgaaattgaagacctgtacaaatacagaatgaatgaagcaaattctgctaacatcatgttgaatgttttctcagaaaaagaggaaatacgaagagaagagatttgttttgactgtgatttaccctcacccccatggatactttctttacttcctaccttttttctttttcttttccttctaaagattctggcaatgggtgtttcagtgttttttaagcttaatatttctggtactcatttatgtaaagtgatttctgaatgttaaaggagatttctttttaaatatattttcacttatttttagctttatgatgagaatcttattttttaaatctgtaacttgttatggctacatgattagtaaaaaaagtttttaaaacacactgtgtattcaggtgtgtcattttagtgtgaaatgactaatgcagaaatatgtgactagcatgtggtcagattttattgaaattacttacgatgtttctatggctagtccccttgtatttttataattggtaacataattcatatgttattttggtcttgtctatttgtgttacatgtattttagtctgaccacttttgctacttatttaatgtttatacattttatgaaagacttattctgaaatataccttgcataaatgtaggttaaatgcaaattgtattaatagtgaaatggatatgtgggtagagatcactttaggggccttttgagatttagtgaaggaaagattggatcaaaagggtttactttaatgtgactgcctaatgtgaaagtcggaacatctgcattaattggttagttacataaatcttagtctactctggcctgcaggtgactgaaacagcccaggaaatcttaatttacattaagcttagacaaggtctgaggcttaggcttagttcttaaagcacattcttttttactttaatgattattcctaattttaatgagcagtgggttctcattgtgtactagtacttaggtgggcaaattaaataagcaaaataggtttgtgctgaatagcatttacccttctgaggacatcctggtaatattttcatcaagagtaattgtgtaatgcaatatttacaggtatttgccagattaatgggcacttgttttcatatttctgagtcatggaaaatatacattgatgattcctgttgcataaagagttttcaagaaaattttgttgaattaagctataactacaaaaaaaaatccattacatattgacctttagaaaggatttttaaaagcccatgctgtccttatttctgcagcttcagagagccgactgctcttattttcttctggcatattctattaatacttgggttttgtatttttcaagtaaataaaatattcctattgagaatttcaattttaaaaaagaaaaggtctactaagtgttcctttccctgttgaattatgtgtgatcatttctatgctaaactagattagggtgtgacttgtgatggtgatttttgttcattttacatattaagaaagaaatagaattttattgcagttcaaaattatttgtagacagtggttttaacccccagacacctaattgtgacaggttgctttccttagtgctcaatactgttgtaaatgtctctaaatacagaatttccagtggagttcatgaattaattgggggtggagggtgaagagggaggagcaacagagatgtgggatgctatagataagtttaggaatatccagatcagttctgaaaactaacagtttggatcaactgtcatgaattagaggtttaagaaaagaaaaatttaggactataggtacaagggaatgcatcaatcagaattacaatttaatttcttttatttcaggtagaaatctaaaactgaccatggctatataatactaatttttgagttatgttgtttcttactatgctttattatcaaaaaaggataaaatgcacattttacttgaagattattttagctaagattaagttcatatttttctcatttttatttaagctgctgtttaataaatgaaaatctaatgacttgaatgtagtcgacctaatgtcttaatgttgatataatcatttcatatatcatagtgcccttttacagccattgtcaactgactggagagcaacccttttctttggtaatatatttctatgggttatgtatttttctgctggaatattgagaaaattaatttttcataatatgcagaataaattatggggttctgcaagtgctagacagtcacttaaaccatttatattgcaatacattccttaaattcagtattttgaatgaaagtgtgttatccccgaattttatcacttgtccaatttaaatattaattacatcccaatagagctgcatgcttaaacatgctttttcagagtaacccaagtattaatttcgagtgcttttaaatattttttctttttagcaagtttcaacaacattaatcctgtctataatgcagcaagttcagtgaaagtacctgttgttttataatttttttttcattctcactgtagggcaccaaaaatatatataaggggaaaaaagttttaatgatatgattagttgtaaatgtttacgcattatcttaccttgaatttttatttttgtaactaataatttgagagttcaataagtatgcagtgtttaagacatagtttgttgcaaaaagtgttaacttactatttctttttacaataaaattagcctttattctagttgatttcataactgtccataatatttagctgtggctattatgaaagtatatttgatagccaaattttgaaagctattatgaaatgatacaattcactacatgatttattatttcatgctggttggggcagtgctgtgacttatgaccttatgattgtcacatgctgaacactaaagctctaccagtttgttatggacactgttttactttatgttatcgttttaatgttttcttttataattattgaggataagagcttccttaattttaagactatttaaattgcagattttgcttttttatttttttaaccatcccttccaaagaatttgatttagatattcagtagtagaaacagaagaaaaatactcaactaaaagtccaaagacctagtttctaatgctaagggagacagtccatggcctccaactaggtactttggagtcaaaaatactttctttacaactgtgtttgaattgttttcaaaacacctgtgtgtgtgtttctaaaattccacaatccttttaacccgtcaatttgatgagggaagtaattagggtagggaatggtataacaaagttggttctttgacattttctttatagattatcgaatgtaagacaaatagatgtgaatgcagatttggtgtttttataagataaggatttaaaataatgtagttggtgatatataaaaataaactattgctgctgttagcacccgagaggtggggctcttgggttctcagagcttgttttctatgttcgttacagttattttagattagaacttaaaagaacttgagagtttccctaattctaccccctaattttttcgaatgagaaattgagatccatagaaagtgttgaggtaaagatcacaaaacacttaatgagcggtgttgccagtttgaatatctcaattcttagttatctaagttccctggtaggcttctttaattatctgggtctcttctagacatctggaacaaatagttgattgacataatacagactagccacatattttataagagttacttttgactcatttagatttttaaaatatacagtgtctgtattcttctctattcattttgttaatttttttttacctaataatgattaagcaccaattatgtgacagcactatgctaagcactttgcatgcattcatctcatttaaatctcaactctgtgaaagtttttattctagttactgtattaagtctcaattctgtcaatatccatgaagcacagaaggcagctgttatttaccttaattttacagatgtgaaaactaaaggcatttaaagagaaaaagaaaaaaaaaaccaggaaaccttaacacttatctgaagggaaatatttaatattgggtatgttagttcctcatgtatctttaataatttttgtcaacagcgaatctttaaataaaatataaaggatcaggcctctgctctcctgcatatatttgtaaagtcacttactgctttttgtcacagtttcaatttctgtaaaatagtgagagggtttttacctgacaggatttgtgcatgtacgtttactttgaaaattaaaaagcattaggccaggcgcggtggctcacgcctgtaatcccagcactttgggaggccgaggcgggcagatcatgaggtcaggagattgagaccatcctggctaacacggtgaaaccctgtctctactaaaaatacagaaaattagccgggcatggtggctggtgcctgtagtcccagctactcgggagcctgaggcaggagaatggtgtgaacctgggaggcggagcttgcagtgagccgaggttgcaccactgcactccagcctgggcgacagagcgagtctccgtctcaaaaaaaagaaaaaaaaaagaaaagaaaattaaaaagcattataaaaatgcaaggtggaatttttaaagctctgccaagtccacttagcttaaaccagcatgactctcattggctaagtacgttatgacatctgtgactgtggtgtaggtattgcctataatcaagaatcttttagggtctgctatgtgcaatccctgaagggtcatggatcgcagtttcataaagactgctgtattttaaagccttcaaatgccaacgtagtatcttcacaatgattttttttttcagttttattattttttgaaagcgccttcgacaaagttttcagtggattttgttgagggatattaagtatgccatctacataatagccatagtgataactccaaccacattgttatatttttattaataaatgctagagtattctctttctggtatttcctattctgatatttttatataatcaagtatgcaaagattctttgtcattggaaaccttaatttgcctgaaaatgggaatgaaattttcaggtttaaaatttttttacatttattacatttattgaagctgtctgaaaaagctcttgagtatattgaataccaaaatttatcctaactgcataaagttgggaggattgtgaaacttgactgcactgacttgttttctttattgatcaaatggttgaaaaaaacttcagttaaacaaatttgatctattaaaccaaagttataaaagcagaggaaagcatagaattattaaacggcagtttaaattggtaaacataccgatgtagaacctaagtttgtaggcagctttcttagatggaaacttaaaaaaattttaatcagaacattatgtgaaatttgtcatctggaattcagctgggtttattaaggacaaagtgtatggctataaaatagattgagttttttttttaaaacagaaaacccaaaataaatgttctaagtttccaccttaggaggctatgtatattgctcctctttgaaactgccttcagaaccaccttgtaagccataaaagaaaatcggactcattgcactatagtaacacctaactgttcttgctcaaagaaaatgtatttatcccttagctttatttgtgtgactccaaatcatatgagtattgccagatatttagaaatttaatcctctctcgaatgataacatttattttctttgagggtttttaaaagagcccacatagatatttctacagaaaatgtttaattctgttttgaatatgcctggaataagtgaatagcttcccagggtgactattctgaaatgggtgatgcttagtggttaagttctgatttgtgttttcttgaagttattaaggaactttatgataacagtttatatattccctcttcttggcatagtaatgaagtaatagagactattcacctctaagcctgattttttaaataagtgtttattttatgtttaagtaaggtaggtctgcttttggcttggacttgaatttggcaatagcagatataaagtaaacataatgtgaattcctacaacagtctcccaaacagtttaatttctcattcatacacatttcccttagtgtatcagggaattaagtatctgattatcagtatagcaagaacaactcaagtatactgaagttatttatactcataaaatagtttgagttatagctacaatataaaattaatatatttttgacttttattcctcacaacctgaaaaaaacctctgcgattactgatagtacttttaaaaactaaatgaattttgttactactatttgctaaatttagtcatgtttactgttcaaaaaatgctaggttaaaatggatcctaatctttgaaatgatgaagacatgtgtagtggtgtcaaaaataggatattcattttgtaactattctgttagtgccgaagttcttagaatttctttgtgacaacagcctgcttaagaactttagattttttagaattgtactaaaagcaaactgttttcttggatatttgttctttctccccaaaagatgatttataagttttcagagctaagaaatgggaaggaagagccatcctagcatggcaggtaatgttttactgctaacaggttttctctgcactgctttatttgccttgaacctcttactttgttctgtcagctgggaggctggtagattttctattaggtagcaaatgcttctcatcactaaacacatatcatgggctggtgttagtgcagtctgtggatgggcactacatttttaatcaagaaatgtttttaaaggaaagacaaattggtgaagtaatttctaattcagtattttagggatgagtgaccttttaattgataatgatatttaacagagctgtacagtgctttgggggtcccacagacatgtttaaacaagaaaacagtaaataaggaagccagaaggaaaagttataaaactattaagaaagaaaatgaaaattctaaacttcaattctggtgcctggctaaatttgatttttgtatgcctcagtgtttctctatggacactgggaaatcaataagcaacctagctacgttattatgttcgtaagtggaagaactaaagaactacaaagacatgttctaggccaagaattctggtggtaggtagagtgggaggttaactagatgatctccaaggtccttctaattgcacttggcagcagcaagcatttatcaagctagacactgggcatatggagatgaagaagatgaatatccccagcagcatggagagcactctgatgatagtcatccctgcctccccctccctcagtttgctttttgaaatgtgagcttgaaagatctcaaactccttcctgggaagacataactgaaacttcatggaggaaagtgcatgaatgaatgggaaacaagatttgattcaactatttggaataagaaaaggggcaacaaggagtctgaaacaaatgaaagaaaagatggaaagaattagttgactagatgaggactgagtacataggaatgagccaacaggagacttcagcaactaatggatgaaagtattatgtgcatgcatgttgtcatcaaatatcacatgatacaagacaaggagaaaacatgactttcaccataacctcagtttgtgtaccctagttgcaagatatttttttcttctagtcacttaagaatatccttattgtctaggagaaataatcctctttctgggctccccagtgtataagcccaaatctgaggaaaatttacctgaaatgttctttccccagatacccacatggtttactctctcatttaaatgtcagctctgtaaaagagatctctgactgctctatctgaaatagtagaatctttcacagtctttccttcttcttgacatcatctatttgtgtcttatctgctcacctgctacaatgtaagctccatgagagcagtgatactgtctgccttgcttactcctgtatgccagcgtctagaatagtgtctagcacatagtaagacctctacaaatacatgttgaatacctaaataaacaaaatttaacatataaaccaaaaagatatataggaatggattatatttctaatctttctcgagtgaggaaaatgtcagcagatagtgaatatcactgagagagagatgatagcccaggttatcttccccagatagaaataagccttaagactgacaggtgtatatgaatacagagagtatacataaagaagatgtattttcaattgacagtctctaaatttgctttaagacttcgaaatggattgcttttcataatttcttagaataactctggtctgtttaccattgaaaaattagagtagccaatgtttgtaaatgaagggttagagggttttttcctttggtggtttgttaaaagcttgctcaaggcagtaacatagtaaattgtcaatataggaacttttgtagcagaagctttatgcttttcacttttataagaattgagattatttaagcagatgagtctaatgtatatgtttgtactgacttacctagaaggtcaggcaagaaatcggtttcctcatttttcagataagtgtgtgtgtaatcactgagtaccttaagagaggaggggtgttttatttttgcctgaattttcaaaatatctttcttcagcttatttatattttagatttgacttattctgtctatagtatataacagtcaggaggttggtaggataagttcatctcttctactaagagttataggagagttcaacctaatatggcaatgacagtcgcagaaaagagaaaatgcaagttaagtaggtgttagccatagcaagaaaatcagatgaggtcatttaagaatgaactgctctaatgttcaggaaaaaagaggggagggacaaggacagggctctagaaggcaaccaaagagagcagccacaaaataaatgaatagctgaagaattaggagacaacaatcttaaaatgtggcagggagagggtagttgtcacattaactagcatagaagagacagaatagaataacataaatatatgagtgattattgttcttgaaaccagtctttaaaacatgggaacattcccaaaaatcaaagccagataaattagggaaatcttaaatggcacaatataactagtgatttcgtttataatttttttaaaaaggagacttaaatttgaaatttagatgtaattaaagcagataataagaaacatacttctgagaccacaaagaccctgagattcagttaagagtaaggtagaaaggctggaagccagaagggaattaagtttctgttccctgagaagccaacacaacaggaaaaaactggccacaccctagttcaaactcttattactcttatcaatagtctcctaattgtttctctagttttctcctctcccttcttaattcattctgcagtctactgccagattaatcttcctagaacaccactttcagtattattcccctgatcaaaaaatgtctgtggttttgttgctcatagcatagtggttctccttctttgtaccacagcccatatgcacgatgatagatggtgggtagccacatgaactctccataacctttggaggatttgggttatacacagtctgttatccaagaaagcatatctgagtgtaagtgagcattatagggatagtcttataattgactccttttaaaatttgttcttctttttgcaaatgccccttcagaatttacagaaatagtgtgttcattccatcagtaaaattataccccaaaatgttaataagcttatttccatcacgtctcctttcctatttctttctttcctctttcttcctgcacatctccccttatcctccacatttctctgtaattacataagcataaacagacacatatgagattttctgggttgcttgcctttaaataaaagaatgggattatcttatacccctttgtctgcagcttgcttttctcacctaacaagtacaccctgaacatccttccaggttaacagatgcggatcccattcttttaaatagacaatattctattcatgtggtttcgtgatttttgccactacaagcaagtttctaataaacacccttttctatgtaccctttacaaatagcaactttttttctaaatataaatgctatggtttggctctgtatccccacccaaatctcatcttgaattataatcctcacatatcaggggaggggcctggtgaaaggtgattgaatcctggaggcagacttctcctctgctgttctcatgatagtgagttctcatgagatctggttgcttgaaaatgtatggcacttccctcttcactcactgtctctcctgctctgccatgtgaaaacatggtttctttgccttccactgtgagtgtaagtttcctgaggcctcccagtaatgcttcctgttaagcctgtggaactatgagtcagttgaacctcttttctttgtaagttacccagtctcagttagttctttatagcactgtgaaaatggactagtacagaaacttggtaccaggacagtggggcattgctataaagatacatgaaaatgcggaagcaactttgtaactggataatgggcagaggttgcaacagtttggaggactcagaagaagacaggaagatgagggaatgtttggaacttcctagagacatgttgaatggttttgaccaaaatgctgatagttatatggacaataaagtccaggctgaggtggtctcaggtggagatgaggcacttattgggaactggagcaaagttcacttttgctttgctttagcaaatagactgacagcattttgcccctgccctagagatctgtggatctttgaacttgagagagatgatttagagttcgtggcagaagaaatttctaagtagcaaagcattcaatatgtggcctggctgctcctaacaacatacagtcatatgtgttcacaaagagatggtctgaagttggaacttaggtttaaaagagaagcagagcataaaagtttggaaaatttgcagcctgaccttgtggtagaaaagaaaaacctattttctggggagcaattcaagtgagctgcagaaatatgcatagatgaagagtagcctaatgttaatagccagtagaatagggaaaatgtttccagggcatgtcagagaccttcatggcagcccttcctatcacaggcctggaggtctaggaggaaaaaatggtttcgtgggccaggcccagggttgcgctgctctctgcagcctcaggacatggtgccctgcatcccagctgctctagctccagctgtggctaaaaggggccaggagataatcttgggctgttgcttcagagggggtaagcctcaaaccttggcagccttcatgtggtgttgggcctatgggtgtgcagaaggcaagagttgaggcttgaaagcctctgccttgatttcaggatgtatggaaatgcctggatgtccatgcattctgcaggggcagagccctcatggagatcctctgctagggcagtgcagaggagatacatggggttagagcccccacacagagaccccactggggcactgcctagtggagccgtgagaagagggataccatcctccagactccagagtggtagatccactgacagctttcaccatgtgcctggaaaagctgtaggcactcaatgctagcctgtgaaagcagctgcagggtctgtacccagcagagccaccagggcagagctgtccaaggccttgggagctcaccccttgtgtcagcgtggcttggacatgagacgtggagtcaaaggagatcattttggatttttaagatttaatgactgtcctgcaggtttttggacatgcatggggcctgtagcctctttgtcttaaccaatttctctagtttggaatgggggaatttacccaatgcctgtatcccaattttttcttggaagtaactagtttttgattttacagtctcataagcagagtggacttgccttgacccaagaagactttgtacttggacttttgagttaatgctggaaggagttaagacttccggggactattgagaatgcaagattgtgttttgaaatgtaagaacatgagatttaggaggggccgggggcagaataatatggcttggctgtgtgtccccacccaaatctcaatcacttgtaatccccacatgtcaggggaggggcctagtgggaggtgactgaatcacaagggtggacttccctcttgttgttctcatgatcgtgagttctcatgagacctggttgtttgaaagtgtgtggcacttcccccttctctctctgtctcctcctctgccatgtgaacatgtgcttgcttctccttcaacttccaccaggattctaagtttcctgaggcctctcagtcatgcttcctttgaagcctgtggaactgtaagtcaattaagtctctgttcttcataaattatccagacacaggtagttctttattgcagtgtgaaaacggaataatacaatagatttccccaaagttgggttcctgagtcaggggtatgtgtatttaaaattttaacagatatttccaaattacttttttcgaggattatggcaagtcacagttccccctggcagtgtttatacttttctttataataaaaatacataaatcattattactaacaaattccttgccatgagtcctaaattgataacaacataccagtgtgccatataacatagctgaggactgttgcagtctagaattcaggctccttctctctgcttttaacaatatgtgtaatgttcaagaccaatttagtgccacttattttgtatgctttcctttatgtagtccaggccatagccccccacctcatctgatggtatcctctggcagccacagaccacacagttctttctacctaaattagtcattagcacatagtaggtacccagtaaatgtttgttgaattaatactgtttatatatttctaatttatctccaagtaaatccagtctccttaaggacaaggaacgttttcactataacacctagcacttaaggtactcaatttaggtagggctgtttgaacaaagaaccacagaggaagcaaatagcatggccttgcctttaatacatatattttactttctcttagggaaaactggaactgtaagaatctagtaacaataataagaacagcacttttattgagcagttactatatgtgaggcacagttcaaactgcagaggatacaacagtggacaaagctttagttgtttctgcctttctgaagcttatggtttatgggtgttacattcaagacatttgtaggacacattctaaaatgccatccaatttcaggctctttccagcagaaactgtggaatatttttccgttcattcagcatttacttagtgcctgctctgccaggaattgaagagaaagcccaaagacaggcagaccttacctgagaggtagtgaactgaccaggatgactgtgggcagtagacttgtttcccaaactagcctcaccatttctgtatttgcatatacgaggaaaggattagatatagggattcatgtcagcatacaccccagggacatttgtttttagtgaaaggtgccagtcttcatccctgtacccagtacacaaaccacgaagaagtatgctcccgtcattgtcaaagaatcatagaattccaaatggagctagttttgatatccagatctcacttcatatgaggaaactaggtccagtattgtgagtaagaattaggactcttcagattccctgggtatgaatctgactaacaactgtgtgaacttgaccaaattcataaccctgtaaactctgtttcctcacttttaaaatgggcacaacaaagtgatgcatgtaaactgcatagcacagtgtctggcacttaaaaagcactcctgaagttatttttagtgatgtgttttaagattagacaactccttaatgccaaaggtttttacttgagaactctgtctgttgtgccatactacacgctgttcataagataagcctttttcattaattgatctcaaactggcttcattatgatcttaactttatttcagttttatttttaaaatttatttttaatttttatgggtatatagtaggcatatatatttatggggtacaggtcatgttttaatgcaagcatgcaattgtgggggtgatatataattgactggggtgagatatctcattgtagttttgatttgcatttctctgatgattaaggatgttgaacatttcttcatacacctgttggccatttgtatgtcttttgagaaatgtctattcagatcttttgtccattttttaagttggattgtttgattttttcctgttgtctgaactctttatatattctagttattaatcccttctcagatgggtagcttgcaaatattttcttccattttgtgggttgcttctttgttgtttccgttgctgtgcagaagttttttagcttgatgtgatcccatttgtccatttttgcattggttgcctgtgcatttgaggtattactaaagaaatctttgcccataccagtgtcctggagagcttcccaaatgttttcttttagtatcctagtttcaggtcttagatttagggctttagtccatttttatttgatttttatatgtggtgagagataggggtctagtttcattctgcctatggatatccagttttcccagcaccatttattgaagagactgtcctttccctagtgtatgttcttggcacctttgctgaaaatgagttcactgtaggtgtatgaatttgtttctgggttctctaggtctgtgtatctgtttttatgctagaactatgttgtttgggttattatagttttgtagcataatttgaagtcagataatgtaattcctccagttttattttttttgttcaggatggctttggctattccggggcttttgtggttccatataaatcctatgattttttttttctatttctgtgaagaatgtcattgatatttattaataaagattgcattgaatctgtagattgctttgggtagtatggacattttaacaatattgattcttccaatccatgagcatggactatctttctttttttgtgtgtcctcttcaatatttttcctcagtgttttattgttttcattgtagagctctttcacttctttcgttgagtttattcctaggtgttttattttatctgtagctattgtaaatgagattactttctgatttcttttttagattgtcctctgttggcatctagaaatgccacagatttttgtatgttgattttgtatcctgtaactgtactgaatttatctgttctaatatttttttggtggagtctttaggcttttccaataagatcatacagtctgcaaacaagaataatttgacttcttccattccattttggattccctttatatctttctcttgtctgattactctaggtaggtcttccagtacttccagttgaataacagtgggcactcttgtcttgttgtagatcttagaagaaaggctttcagtttttccccattcagtatgatactagctgtcagtttgttgcagatggcataactttcaaactaattgattatagttaggaagtggatactttaacttgtggtaccattatcagatttatatttcggccataagcttgaagaggagctgaaaaatgcatatgtgatgcatatgcttcctatttggctctcttctcccacccccctgccctataatccacacaagttcctctctcagtcactcatcaactacttgaacctctgaggaacttggggttaaggtaaattagaataaaactgtctgaagaagagcaagcctttcatgtcttgagaaattcttggggttttagaaataacttcattgctttttttctccagttactttggcttcttcttaaagagaatactaacactttgaacgtcataatactaaggttctgcctcttcaaataaagactttaaaaaaaaatggtttttgtatgattcagtgtgaattaaatcccacagtgtaaaggactttactttcttaatgtagattttcaaatacacaattactgatgtttataagtagatttattacaccaaagcacctagcaaattcttgaatggatcaggtcttatttttcagtcttactttgcaaatttaagtcaaataattaaggatttgttaaatatttgtcttaatatcaagcttttgcatatcggggccctcttttataagctttataagcaatcttttgttttctctgcttgctcaaagtagctatgtttgttgtatctgttagtatttgctctataacaaacatactgggtgccttcccacttagatttggcaattatcactcctgtaaatgagatattacataagataggaaaaagaacagtatctttccaagaagaatagtatccttccatattaacagtttagagctgactgcttttaaaatttagtggctttaaaataacaaccatttattattcttcatgagtctacaaatgaggtgggcagttctgctgatctggccaagctgaacttatctcagctgggcacattcagcgtatctgctgtcagttggctggttggctgtagcaatgaatggtgaaagtaggctgcccttaactttttcacacagtagcattagagttacaaaagaaccagcagaaccatgcaaaactctttaagacctaggcttggaacaactatatttctaccacattctattggtcaaagcaaatcacggggctagtctagattcaagtgggtggaggagctgcaattacactgcaaaggagtgtgactgtagggagaggtgtttttttatttttatttttttgcgatttgtcacagtagttgtaggaatcaggtgtatttaaaattctgatccttctgtgatatccgaattgttcatgaaccttgcctctggtggaaaggcagaatcattgtgacagaaggataaaatcttggaatttagagactaacaaaggttcagattccagctccatcacttatttctgcaatcctgcagaagttaatcttcctgataggcattcagtaatgattgattcacctgaacctcagattctttatgtattttaaagaaagggctaggtaaatgcaaagcacttatgtaactgcttttattattgcaaacctggctcccacactccattcaaggtgtaagactcagtgtcttccttgaattaaaaaggaagagaaagtgtgttagggaaaggaagagaaatatttgactaattgtggccccaataaagtgaccactcactgggggtattttcctgtaagaaaagaatggttgaggctcagagttaagagatacaaatccaaaagtctccttggggtaggattccctgtgattcatgggttgagaggtgtaacattagacacagtcccagtctagattttttttttaaagaattgtagtccatcctatacacactgggtgccttaatactatatgtggcaattatcactcctataaatcaggttttacataagataggaaaaagaacagtatcattccacattaacaattgaaagatgactgcttttaaaaaattaaaagggccatatagaaataaaatcacataaatttcttgtgttaaacatagttgtcatattggatgaggactaaacacctaaattcatccaactagtagtaatagaaaagatgaaacacacacacagtaaaactagattaatttaatttatacaaagggccagatatctcagaattcagacagtcagagatgttgactagagttaatgcctcttttaggagaggtaccaggtaagtgttctcaaagaactggaaactgagaccaccacctctggcattatctatttgtgaacacaagcaagtctgaatttttccgcaccatagctacctttcatgtaagcttcttttcttagaagaaaagaaggtaacatttgggtgtaattttttattaagggtgaaatttagtgtagagagtaaaggcatttggcatagaagcccttagttttttttgtttttaagttgaactgccagcctttatggattgcagtcttcgctgttttgattgacatttcccaattcattttgtattatttatttttttaagagacagggtctcactctgttacccaggctggagtgcaatggggcaaacttggatcactgcagccttgaactcctgggctcaagcaatcctcccacctcagcctcccaagtagcttggactataggtgtgcaccaccatccttggctaattttttaaatcttttgtagagacagggtagtgctctgttgcccaggctggtctcacattcctggcctcagttgatgctctggtctcagccttccaaaatgctgggattacaagtgtgagccactgcacctggcccccaatttcatcctttacaaagactactttcaaccataaatcaacggaaacttcagctccctcagacatatttgggatccaaggatattttcccaaatgattaatgctaatttcatatcaatacatttttgcaaaacctacaaaaatggactagtaaagaaagactcttaatttgggaaagacagttacttggagagaagagaaacttaagaggcaggtcgagttcagtgttcagaaatgagaggatcataaagagatagccataaaaatgtttctccctatattgcctgctgatagggtgtatcagtgaaggtcttactaaggaccttgtaccttttcagcgctgcactgcgtgctcatagggaggaaagataaatcatgtgttttttctgacctcaaaggagcctgtatctggctagagagacatgatgcagacacatgaaataattaagaaacaattaactgtagcaggtgctgaagaatataccaggaggtcagagaatggtagagctagtgtgggcgaaggtatagcccagagcatcatcagatgattcttccttatgcaaattcacatctcctctgggtcaagtatcatcctggcatgcagcagctccataggtaatgccctaaggctagcctgaggcaagttgcaaaagccatcatattgagtcatggcctttttttgtgtggggggaggggaatggcatccccttcctgtctgccaaatcaaggaatacagtgccctcctaaacctgctttgttttagtggattgttaaaaagaagtgaatgaatttatgcttcattagggaaaggttacagtggaatactgaggagtaaggggtatttctatttaacaaatgacataacttgaaggaatgaaatcataaggatggaatttcaggcattaataaaaagctgatgagagatactttgagacaaaagagccttcccagtgtaaccgagatcacagcacctacttcacatacacaggaaaccagtcctatctgtctctcccatagagcagtagctgccttgtttttcctccctcctccatcattcattctaaatctccagtcctccaccgcaccttatccaaaccctgatacccttaagtcacagatggtgaatcagtcaaaagtagtattaaaaactagtggtacacagctacacctggaatgcagtaagaaaaatacggatttctgtacatcatcttccctccctgctcttacccccatttaagagttacagggtcagaacccaagagtctgagtttttgaaagtccctaaaaattttggatgatcacctacatttagaaccactgcactaagaaggacaacaaatatgccaataaattctgttgccaaggaggtgattatgcaagctggaaccctgataacatgaggagaatcccacaatagccaaatagtccatgtactagttacattataataaagccaaaagcagcaggcctacctgactttctcctgaggtctatcatgagcttagagagaaggaacgtggacatatagaggtagctctagatggagaagggcactaggtgtcatggaaagaatcatgtgcaagaagtaaagaggtgctctgaatgtcctagccctgcttaggtgtctgtgtcctcacatgagaatttatccacagttctttcccgctgtaacaatctttggttccaactgcatttgtgagacagcaaaaagctatggtccagtctccttccattgtatcatctcatcaatgtatttctcccactacccttgtgtgaaatacaaacttttttggcttattgtgattatgcaaggtgtatgccaactttttttttttctccacatctttcagctttctgatgggtaaaaattttccttattttgctttagaaaaattctcattggcatagatctaatttcagggagcctcccttgaaagctaaataacattgagaattcatgaaaatataatgtagagcattatgcctgttagcatattagtttaaatagaagtggttcatgaaaatttttgaaatgccagaccctgtcctgtgttttgtattctcccaaatactcatccagatactgttcagaatgtaacatgattattttgaaataaagattttcccctagtttttaaaaaagttactttatacattaacccttatgttcctctttgatcaatttttccagtagtgtaaacagtcttcagggaagtagatttcttacagaaattgtcaagtggctctctgctgttagcatggttactaatcttttggttacttttcatattttttatactttctggaagtggacaacttacttgtaaataaaagtgcataatttgtattaaaaatttttagtaacaatctaatttgtaaaatagatgtgagcagcatgaatgtgtgtgatatgcgtacatacgaattatgtctcttaaaaatgtatcacagacatctttccgtgtccaaacaaatctacctcattctttctaatagccatatgggtataccataatatatttaactaggcccctattaaaagaattttgactcttttgtagctactatagtgttgcagtgtgtatctgtgtatgtatctttgtgtgtgtatctttgtacgagtgtacatatattttccccttggctatttcagatttttttttaggtttaaatcttaggaaaggttttgaaattgtcttaagtattttcagaagcattaaatcatggtttttttacatttttcttttagaagttttatgtcatctctatgagtagctttcagtaatttgttctgcataaaattcccgaaaacttccatttaaaaataggtggcatgactagactttctcagccgaaagagtgaggtcccaggaaggattttggagaagctgtgttcaaatatagctgctgacctgatgtctgcctagagtctggcaaggtgatgtgttgaatctagtgtctgcctgcatgccagcatccctttactgatgagatttgtggttttcatcacttcatggtaatcatcccaagttataagatggagtctctagaaaatcagtagagtatgaaggcccaagtaaaatacatgtgagtgcatgtatgtgtgcatacaaattacttctcttaaaaacgtatcctgggcatttaaagaatgaggacctccgaaggattttgtggaagctgtgttcaagtacagctgctgagcgtatgtcagcctggagcctggcaaggtgaagtgttgaatctagtgtctttttgactcactgttttttttgactcactgtgctttgaagcccttgtcatttgggctcataaaatagatttctgtatactgtctctcctccctgccctcgcccccatttaaaagtatagtggcagaacccaagaatcagagttactaaaaactctctagaaaatttggatgatcacccacctgatcatgtcttttttactcactatgttttttttttttttgagacagagtctcgctctgtcgcccaggctggagtgcagtggcatgatcttggctcactgcaagctccgcctccctggttcacgccattctcctgcctcagcctcccatgtagctgggactacagggcctgccaccgcgcccggctaattttttgtatttttagtagagtcggggtttcactgtgttagccaggatggtcccgatctcctgacctcgtgatccacccgcctcggcctcccaaagtgctgggattacaggcgtgagccaccacacccggccctttactcactatgtttttaagcccttgttttcatttgctccactgtaaaacattccccaagccaatctggagctgaggcaaatttttaacaatttaaaatctggggaatataaatattggataatgatcatcctgaaaaaacaatgaaggtagtagcataatactttatatatcaataaaatggcaaaataagacagttgttgaaggacagaaagagtaactgaagttaggagcttatcttaacacattttttgtgtcataccataggcatcatattttttaaattttttttatttcatacacataggaaaatatatgtgtgtaagaaataataaacacctctttgtacctaccacccaacttaaggaacagctcattgctattccctttggtgctcgctggatgccctttcccagtcacatccccctcccttcccatctgcaggactatactagtaaattttgtattttttgcattattttgctttgttttatgattttactacctatctacatatccctaaataatacattatttagtttcatatgttttaactttatgttgtggaatcacattaaatgtagtcttttttttttatattatactttaagttctagggtacatgtgcacaacgtgcaggtttgttacgtaggtatacatgcgccatgttggtttgctgcacccatcaactcgtcatttacactgggtatttctcctaatgctatccctcccctagccccccaccccccgataaatgtagtctttataacttgtttttttaactcaacattgtttgtaagattcatccatgtaagctgaagcttttttatagagatctttgttaagccttttaatgaatacagtacatacatttctctgttcccctgttagtggacacttggattgtttccagagttttgctgttttgaacaacgctgctgtgaaaatgtctcctgaaacacatttataagagtttttttttccccaagggaattatacctagaaattgaataactagatcacaaggcatacacatctacaacttctgctaggtaatgccaaattgtttccaaggagcgttagaagtgttctcatcaacttttactagtgctagtcttttacatttgtggcagtatggtgggtgtgaaatatttatgtttagtttttcttggtgccatttaataatttttataaaaaatatttagaagtcaaggcagttttttgtttttgtttttattttttgcttgttttgttttaatgcagacattgagattacgacttggaataaacattggttgcaaagttcctaaaaggaaaactttttttggtattctggagcttttctggtactgaataaaataagtatgttaaattatgcatgtgtagtttagaagtcagagcaataattgtgattgttgaacagaatggcagtaaaaagtttctaaacgattgtactgtacaagggacacttgttgtgggtcagttttagcctccccaacttttatgttaaaagttgcaacaaggtttaagggcttatgtttgataggccagatggtgaccagctgtgataaaacacagggaacccttgcaaaggatttcaaaatttatgcagtagtccgccttatctgcagttttgctttccaaggtttcagttacccgcagtcaactgtgttctgaaaatattaagtgaaaaattacagaaataaagaatcgaagagttttaaattttatgcttcccacccatcccacctgggatgtgaatcattcctttgttcagcatctccatgctgtaggtgctgcctgccccttagtcacttggtagccatccaggttatcagattgactcttctagtattacaacacttggcttcaagtaatccttattttacttcatagtggccccaaagtgcaggagtggtgatcctggcaattcagatatgtcaaagagaagctgtaaattgcttcccttaagtgaaagatgaaaattctagacttatatataaagaaaagaaatcatatgctgagactgctaagatctatgataagaatgaatcttttatacatgaaattgtgaagaatgaaaaagaaatgcgtgctggttttgctgtcatatctcagactgcaaaagtttgcagccaatgtgtatgataagtgcttagttaaaaggaaaaaggcatttaaggtaagtatatatagtgtttggtactacctgtgatttcaggcatccattgggggtctcctgagtataaggggagactactcttttagtgttaaatgaacactaaggaacagagatggggaagaggttggagaagattagttcagcagtttgagtataggtaaacagttgtttgagaaagaagaaaaatgtgattagtattttaccttagcaatagtggcatagataatgataaattatagtcacacagaactcttagtatttacagaacgttcacatttgtgatcccatttaacaataactctgaaagaaaggtatcatctaccactgctttattgataaagatataaaaggtaagagagatgaaacatattggccaatgatacccatctggtaagagacagggatggggtgggaccccaaggctcttctcgccaagcccacggtttttttgctttatacttttttgcctcctgatcaccatggctgcagtttctactgtggacaatgtctgtcagcaagcattgatcccctgccttcagcactcttacgtcttagcaaggactggaaagaaaaagccaggagtttacagtctgctggagcaacagaaaagaatgatatgaaatatgaagagaccaaaatgatttataataaggtgctagactatgtagtaaaaatctgctttagctgtaagtcaaaagcaagagcagtcttttcagaatggaatagaaatgttggaattaaaggaattttcaaagttgtgaatttttttcaagataaacatgttttattttggtaattatggtattactaatttgataaccttcagggagccacctaatattatagaagatgtacatataatgacaaaagcaaacattttatttttaaggaccacaatctaatctaaaacaaaatttcccccttttctggtctttggttaattaaggacttatttaaatatcaaagaaagacacatagaaaacatttagtatatttctatacttttattaatgtcctccataccttacacagatacttgacttggctatggtctagataatccatgaaaatttaaaggacagattttaacaactttatgctaaattgatagatctctaggatcagattgccatcactctcagatgcgaagcttccaaccacttataggttcctgatatcttgcttttatacagacctaatttctcttcctttaaactttcttttcctcagttgctatttgattgaaatattgagtcattaaaaatttccaagtgggaatttttgtgtttcttcatctatcatgaagctgctcaaataagtaggtgtttgaataggagtagaaacagtaataggctgaagccagaccaatacagcttcagctaaatgccgaccttgctaaagtctgggaggaccggtgtggtattctacaatgtacaagtctgtagccggtgcccttaatatgttggcttcatgtctcatgactctcttctgtaaatatgcagtttaaaaaatacaagttattctgctgtagaagatacatttgcaaaattgatgtatcccctctaagtaaagttggctaaacaataaggacatatttataattaatgaatttgagaagaatgctgacgatatgcattattctttgaagttaacatttttcaggtcctaaataaacaaaaagtaggttacttctgtctggagtgtatgcaaggggtaccatcttgtccttggttcctggctgctattccaaggtgctataaagtcagctaaagagagcaatcataatacattgatagcatccctcaatgtgtttctgagctacttgagaatcttatttttgaataggtagcaggaaaccatctttgcagggcagcatgggcaaagggattggagggactattattataaagatccactgaactgcttcagtatcataatatcttaaactaaaggactggaaagagccagattccaatttaatctgctcttctatgaattcttagctgggttcatttaaaaagaaaaaacttgaagattgcaagattttgaagacatcttaaaataggtgaactccaaggtgcactttaaacttgagactgataactgaatactccttcaccttttgatctgatattgtcaaaatgaatgaggacttagtgctctagtaagtttggaacagaatgatattaatttattttctcatgattgattcttttttgctttttaatagattaaacttcaccgtagaacagtttctcaacctctggactattgacatttttgattggataattctttgctgtcagggctgttctgtgtgttgcaggatagttagcaacatccctgacaatcacaaatgttactttctgtctctatggatttgcctattctggacatttcgtataaatagaatcatatatatgtggcttcttgtacctggcttatttcacttaacatgttttcaaggttcatccatattgtagcatgtaacagcacttcattttctttttatggctgagtaatattctgttatgtggatatactaccatattttgtctatccactccttagctgatggtcttttaggttgtgtccattctttggctattataaataatgctgttaagaacattcatatacaagtttctgtgtagacatatatctttatttctcttgtgtggatacctaggagtagaattactggatcatatgataactctatgtgttaccttttgaggaactgccaaacatttttctacagtggctgtatcattttacactcccatcagcaatgtataagaattccaatttctctgtccttgcctatatttattaactgtcttttcttattagccaactgctgtggttcgaatgtttgtcccctccaaaactcatgttggaacataatccccaatgtggcagtattgagatgtgaggcctttaagaagtgcttgggtcatcagaggtctgccctcatgaataggctaatccattcatgagttaatgtactaatgggttatcactggattgggactagtggctttataagaagaggaagagaactaatctagtaagctcagccttctcactatgtgattgctgccctgtgtcaccttgggactctgcagagagtcctccagcagcaagaagttcttcatcagctgtggccccttgaccttggacttcccagcctccagaaatgtaagaaatccatttcttttttttaataaattacacagtctcacgtattcagttataccaacagaacacagactaagacaccatcctattgggtatgggtatctcattgtgttttttatttgtgtctcccaaatgactaacgatgttgaacatcttttcatctgctttttggacatttgtgtattttctttgaagaaatgtctttaacattctttgcccattttaaaattaggttgtctttttattgttgagttgtcggtgtgtgtgtgtgtgtgtgtgtgtgtgtgtgtgtatctagaatatatgtgtatgtatatatgcagatatattctaaacactagacccttatgaaatatataatttgaggacaatttctcccatttaaaaggccatcttttcacttcttgatagtgtcatttgactcacaagtttttaatttttatgaagtccaatttattttttaattctttgtttttggcactgtatctttaaaaagttgcctgatctaaggtcaaactgattttcacctatgttttcatctaagaattatagttttagctcttacatttaggcctttgatccattttgaattaatttgtgtatatggtgtgaagtagggctctaacttattcttttgtgtaatgatacctagttgtcccagcaccatttgttgaaaagattattctttccccattgaatggtcttgataccttgttgaaatcaactgaccataaatatataggcttattcctggactcacaattctatgagtctgtatgtctaatcttatgccagtaccacactgttttgattattacatctttgtacaaagttttgaaattgggaaatgtgagtcttccaactttgttcttttttaagattactttgcctatattccgtgttcgttgcaaactcatatgaattttaaatcaactctccatttctggaagaaaaaaagaggcaattgaagttcagatagggattgcattgaacctgtagatcagtttggggaatattgccatcataacaattagtaggtcttccaacccatgaatacaagacttctttccatttctgtagatatttagtttctttcattaatattttgtagttttcaatataaaagtcttgtacttcgattaaatttattcttgaatattttgggttttgatgcttttatgaatttgttttcttaatttcactttaagattgttcattgctactgattagtaatgcaactgatttttgtgtgttgatttttgtatcctgcaacctagctgaaatcattgattagcataatagagtatttaatagatttaggatttctatatataagatcatgtcatctgcaattagagataattttacttcttccctttcaatctggacattttttacttctttttcttgcctagttgccctagctagaacctccagtgcagtgttgaatagcagtggtgagaatgagcatctttgtgttggtcttcatcttgtggggaaacctttcagtttaagtgtgttgttgtggggttttcatagttgtcctttatcagattgagaatgttcctttctgttcctagtttgttgagtgttttctttttgattgttttaatcaggaaagggcattagattttgtcaaatgctttttctgcagctattgagatttttgtgtgtttttctggtcttttatggtttatcacattaattgattttcatatgtcaaacaaaccctgtgttcttgggtttcatctcacttggttatggtttataatcctttttatatacttgtagattcagtttgccagtattttgttgaggatgcttgcatttatatttataagggatattggtctgttgtagctgaccagtaagtatagtaagctgtatagtttactaagtgttccctctgttttgggggagactttgagaagaaggattgttggtaattgttctttaaacatttggtaaaattcactagtgaagccatctggggtcttctttggaagttttttgattactaacttaatgtctttacttgtttgttataagtccattcagatttttttctccttgagtcatttttgacagttggttgaggaatttgttcatttcatgtagttatctaattggttagtgtataattattcatagtattcctttataatcttatttttttgctgtaaggtcagtcataatgttcactctttcatttcggattctggtaatttaagagtcttctctccttttttttcttggtcagtctagctaaagtaaagttttgtccgttttcaggggaacagctttttttttttttttgaggcagaatttccatcttgtcacccagtctagagtgcagtggtgcaatctcggctcattgcagcctccgcttcccgggttcaagagattctcctgcctcagcttgccaagtagctgggattacaagcgcccaccaccacgcctggctaattttttatatttttagtagagacggggtttcaccatgttgggcaggctggtctcgaactcctgacctcaggtgatctgcctgccttggcctcccaaagtgctgggattacaggtgtgagctaccgtgcccaacccagctttggttatttttgttgacctactctattgtttttctcttctctatttcacttatttctacactggtctttattattttcttccttatgcttgctttggacttagttcttctttttctagtctcttaaggtggataattaagttcctgatttgaattcttacttctttgtaaggtggtcatgtactgctatgaatttccttctcagaaatgtatatgctttcactgcatcccttaagatttggtatgttgtatttttgttttcatttgtctcaaggtatagtcttctgatttccattgtgatttcttccccctctaacccgtttattatttaggaacttgttgatttccacatacctgtgaactttccagatttccttctttgttaattctcagtgtcattccattctggtccgagaacatactttgtatgatttctatcttttaaaatttatttggcttgtcttatgacctaatacattgtctatcctggaggatgtttcatgtacacttgagaagaatgtgtattctgcttttgttgggtagagtgtttgacaggtgtgttggtacatagttctgttcaaatctgtttccttgcagatttctatctagttgttctgtctattggaagtaggatattgaaatctccaactaatattgctgaattgtttattgttttcttcagttctgtcactttttgctttatatattttgaaattctattgttaggtacaagtaagtttatgattattatatcttcttgatagattgattcttttatcattatacagtgccctataagaacaatttttatcttaagtctatttgtctatattagtatagccacttcagctttcttttgtttactgtttgcatggaatattttcttcttttactttctatttgtgttcttgagtctaaggtgaatctctgtagatagcaattggatctgccaatctttgctttttatttggggagtttaaaccattgacatttaatgtaattattgatgaggaagattacttctgatattttgccatttgtttcctttattttgtgtctcttgttcttaaattcttccattactaccttctttcttttgtattacatattttctagtgtaacgattttaatttctttgtcatttcttttgttgtatgtttttagttattttcttagtggttgccacggagattttattgtcattttaacagcctaggttgggcacagtggctcatgcctgtaatcccagcactttgggagactgaggcaggaggatagcttgagtccaggagttcaagaccagcctgggcaacttactgagatactgtctctacaaaaaaatacaaaaattagccaggcatggtggtgtgtgcctgtagtcccagatgcttgagaggctgagttgggaggatagcttgagcccaggaggttgaggctgcagtgaactttgatcacaccactgcactccagcctgggtaccagggcaaaactagcccaaagaaatgaaggaaaaaaaaaatctaatttagattaatatcaactcaacttcaacagtgtataaaaactttgcctctgtatacctcttctgcttccactctgtgctgttattgtcatagattttcatctttctacactgtgtgtttatcaatgtagatttaaaaatattgcttagtagttgtctttagaatccgatacggagaaaaggagatataaacaaaagatgcatttttactgtcttgtatgtttacttatgtaattccctttcctgatgttgtatttctaaaggcaaagtagggttattgtgagtgtccttttgtttcaacctgaaagactccttttagcatgtgttggagatatgctaatgatggactctcacagtttttgttatctgggaatgtgttaatttatccttcatttttgaaggatagtgttggcaggatacagaattcttggttgacatgtaattctttcagcattatgaatatgtcatcgtactgtcttctgacctccatggtttctgataaggaatcaactgttaatcttattgaggatcacttgtttgtaatgacttgcttgtcgtgctgctttcaagattcattctttgcctttagcttttggtagtttgattgtgatgcatttaggtgtgtactttattagtctgttctacttggagtttgttgagctttgtagatgtatttcatcagatgtgtcaagttcttttgccactattttttttttaaataatctttttgcccctttccgctccttctgtcactctgattatttgtgtgttgctttgtttggtggtgtcccagaagtctctgagactctgtccagttttttcctccccattcttttttctttcacttcctcagactggatgatctcaatttgacctatcttcgagttcatggattttctcttctccaagtgacatctgtgagatgaatttttttctagagaatttttcatttcagttattctacttcaaaatttctctttggttcagttttatcattgctatctttatattattctcagtttaatgagatactgttttatactttcctttagttctttagacatagtttatgtcactgaatatatttaaaatagctgattttaagtctttttttttttatttttttggagatggagtctcgctctgtcacccaggctggagtgcagtggcacgatctcagctcactgcaagctccacctcctgggttcacgcaatgattttaagtctttgtctatgaagtctagtatctgggcttcctcaggcatagtttctgttttctttctttcttttcctgtgtacttcgtttctttgtataccttgtaattgttgttgttaactggacattttgaatattatagtgtaacaactctggcagtcagactgtctcccctccccagtatttgttgttggtgagtattgtagatgtttgtttagtgacttttcatggctaattctgtaaattttatattctttgaagattgtgggcaccctgaagtctctgtttgttagtttagtggtcacctaataattaacagagatttcattaaatgcctagaagcaaaatatcttccagtctttgcccatggcctctgtgtatgcattagggcaggccttgaactcttacccagggagtttacaaccctgccttagcctttactaccagcttctgcagagcattaaggtcaacaggtggtgagagtttggagcctactccatctttcctgagcatatacacagccctactcatgcatgtggccctctagatttccaggagtatgttggaccctttcaaagcccttacagactccccagcttttcctctcaatctttagactagtgtgttgttttcttcaacagttatctgtcaggcagcagcaaattaagagattagcataaatgttttcaactcctccacccgtcatgtgccccagggaagcactaagccagttctaagttaggcaaaataaagacaatccttttgaggtggtcttccatggagtcaccagacaggtaaaccaaataattaattacaagtctttggctggatacagtggctcacacctgtaatcccggcactttgggaggctgaggcaggtggatcacaaggtcaggagattgagaccatcctggctaacacggtgaaaccctgtctctactaaaaaatacgaaaaaataggtggctgtggtggcgggcgcctgtagtcccagctactcgggaggctgaggcaggagaatggaatgaacccaggaggtggagcttgccgtgagccgagatcacactactgcactccagcctgggtgacagagcaagactccgtctcaacaaaaaaaaaaaaaaacaagtcttcatgaaagaggtccattctgctgtctttcataccaggaatgtggaatgtggactgttattttcatggctactgctaagctaggaatcaagggatagatggggactgggtaaaacaccacagagtttgctgttcttaccaagaataagctggggaagagggttgtttttgtttttcagtaaaaattccctgggctgcttcaagccgttgattaattttcaggttccgaaaaagttcagtttgacagtttttgccctttttatttgcttttatggatatgtagaacttgagttcttttttccaccagttttgctgacattgttttaaaagcactttttgtaaaacccaaatgttgtctctctcaaggctagccaataattaaaaatactgttactcccctttgattttggaaatgaattcgtattgaccaaaattcaatactagaggtctttcaagctgttttaccatttatctaaactttagaatctaatgattcctgtacattgtctagcatactggtggtcctcaattgtcataagttcaactttggaacaaatgaactttttgtgtgcaagtttccaattgtttggaaattacattgatgccccctccatcaaactgttattcgtgggacatctaggaatttcttacagcagctgacaaatatttcaagtcagtgcctggtagtactgtccaccaggcaacagcttcagtagtagagcgatctttatctataaggcagtgtttgagcaattgtttattagtgttttcctaactactcagaagaactatcaggggttatagaggtagctcagagagttgggtgcaagtagagaaatccacccggcttgcattacacatcttatttctagagaagctttcctttgaagaaggagttctaaggtttaaaaaattaccttgaatgccacttatattgcattttaattttattttagagaaatcaatggaaagtagaaaaattaaggcactgatactagtgttaagaatgttggttaaagcttctggcaattaattttttatttccttttttaattttattaaaatttaacaattttcagtttatgctgtaatccagaccaaggtttcaatctaatgaagttaatgccagtgttgctgctacctattttgtctttagtcattcagccatgcttcctacttatactgaataagctagcttaatctaacaatcaaaaaagaaagctgttgcctaagttaagaaaaacagtttgaactgttttcaaactaaatacccagtagactctctagttgttgacaggagaatgcttaattcagaattgtcctgcagtagatcattttatctcattcctgttcttctataggatagcttatttgtttgaaattgtatttaatatgttgtgatttttgtgtgcttgtttctatttttcactggatagactcaagataaaacctggtaccctgcagtgtagctatcagtttatagcagaggaaatttacattagaacttggctgtgtatttacatgtatctaacttggaggtcactctgcttactgttgatatatcagtcatattagatgagtccctaatgagataccagaaaccccggaaacatcattaggtggaacagtgtccttaatgctttattaagtgttataggtaagacaaagcctagtactatttgtggcatcaaggttaggtgtttaaagacctgtattcttctattgtcatgttgaaattgttcccttgatgtagcaatagaaaattttagattaggcttaagttaatcagcaaacaaagataaaagtctgatactatcctaaatattttgtgtttctaaataatttaacagtgatccaattagctactcctgtagaaatgtaattgataaacttttcactctcttttaaattgccatcttgaattttacctgttttttaaagctgtctcaagtcctctctaaaaaaaggcagtcatttataaatttagaaaagcttgatagcacagaaagtcacagaaaaatgtaaacatagtttaaaactgaattgtatacaagccactagaagtacttttattaagtttacaaatattagtagagtggaactcatgcatttaatatgtttgaaacttttgatcaaatactgtgctatgaaaaacattttagataattattctttaatcatgtgtgtgtaaaatgtggctttttttgacaaccaagtagcttttctgtgtgccaaactgtgactttaaaattttaaagtactcaacagagtaaacaaaccacaaataccacttaaactgtacacatttgcacatgcatttcctataaatagtacatgggtttcaagtcttcacttttgaaattcagaaatgggttttttctccttccagtagaaataaaaacttgatttattttatttatttatttattttatttttgagacggagtctcgttctgtggcccaggctatggtgcaggagggtgatctcagctcactgcaacctctgcctcctgggttcaagtgattctcctgcctcagcctgccgagtagctgggattacaggtgcctgccaccatgcccagctaatttttgtatttttagtagagatggggtttctccatgttgggcaggctggtctcgaactcctggcctcaggtgatctgtctgtctcagccttccaaagtgctggggattacaggtgtgagccaccgcatccagctaaaaacttgatttttaaaaatccaaatcgaagacagaattgtgtattttagtacatttattagcagccttgacgctataccatatggctgtttatcatttaaacagcttgtaaaagcaaacacttcaggattcatgagtggcagaaggactgagtactttgggaaataagagagaacttttgttgaggatggttgaggaagagtccaagacaataataggcagaataagcaaaaatctagagactcattgtaggcactcaagtatgtatttgttagaatgaatggctgaacttggtatattgaggaacactgagaaagccatactgactggaagatagttcctacaagaaactggtgagacatatgttacagtctagattttggtgagccttgttaaagtttgggctttatttttatacggggagaaagtttcacaggggtttggaaatgaggcttggagctgttaatggggacacagtgaggttttagggtagtggctttcaaactgtttaaatccaaactttgatgataaccctgacataactattgtttataacttccatttcagttgtattggttttatcaaaacatcttcattgatcttactgattgcttcctatgcagattaatattataaatttgaatgtacaaaggaagctttagcagtaaaatagcaacttttatctgtcttacgtattggaggttctgcataagatttaattttttttttttttgaaatggagttttgctcttgttcacggggctggagtgcaatggtgtgatctcggctcaccacaacctctgcctcccgggtttaagtgattctcctggctcagcctcccaagtagctgggattacaggcatgtgccaccatgcccggctaattttgaattttagtagagacggggtttctccatgttggtcaggctggtctcgaactcctgacctcaggtgatccgcctgcctcagcctcccaaagtgctgggattacaggcgtgagccaccgcgcccggccaagatttaattttttaaaagaaaatattttgctaagggtttggaaactcttgttttagcaagaatggattaagactgattaaaactaaaggcaaagaggaggctcttatgtttggaattctttgctaatatttacacaatataattctctccacaaatatttaatggtaccagatattagatggttataatggcaaaagtgttcaaaggatgctatcatattcatgattcatgatcaaaatgaacattataaggctatccctcttcagaattaaatacgttactcctgtggaaaacttgcttttaatgtagaagttgtcccagagcctttcttcctttctcatgtcctcttatgtccactgctgagctaacatgggtctcactgaatgattaagaaaaaacatcttaggtggggagttctgtatatagtaaatgtttaatttattggggtggtgaacgggaagtgctgctggcaagagaggatgggaagagaaatctacccaaatccttacccgctttacagaacataaacttcctattcagtagtacacaataacttaacgatcaaggcatcttaacttttctgttttcagatgaaagaactatcgtttggcttgatcaagtatttagtatttattcgttcactcaagtgcttacgtttttttgttatctcagggttttacgttagttattaaccaaaagaactagttttagttctggaagtctaaaatatataagagaaggtgaggagtaataagagaagatgaagggagactttcggaatggcctatgaacttctagtaactataccaccttaaaatagacaaattacaatgcagttatgaagatatgtatttttcagtgaagacaactaaaatgtttgcacagaattttcttttttattgagtgttagaaattctattttggagatactaccttgcacaacataaaaagaaaaagtgagtgtggaatctaggaatctacgtggctctaggaaattttttaagtgtggaaactgaaggagagcaagagaaagggagcatggcattcccctgtttgtagttcatgaggtgggtttaaattgccttttgccaatgcagctgcacactgaggattacagaattctttttaaatgtttgtagaattatttttcacttattaggtaaaacgtgtattttttgattttctccaatttcagctttctcatgttgctatgctcaattttgtataccatatatagttttgttaaattgacaaagtggtgttttttgttcttctttttcccattggttaaaatttaaagagaaagtggaagctagaaatttatctaaaaaatgtaactttccctgtaattattaaagtatcaatctaaatttgaattttctttgtgcataatcttttttcaagctatttaccatgttgacaaacttgctttcctgtggcaaatacactagcaatacgttataaatatgtaactttcaacctatttacagttgatgcttttttagccctttggatttaaaatacaagcactgaagaggtgaggaagtaccactgctgcctcagcattatttcgaaattctgtttataaactatacaatttccaaggtcatgaatccagcacctttccaggtactaactattgggacaaagatagaatttgattttatttatttacctattgactgaagtctaacttaaatcttgcacctagtaagatcttagaaataacgtgtgtactctgacctgtaaactaatcctagtattctgtgtgtatattctttctcatttgggctcttaaaaggaaaagtaacgtacatctgatgatcattagcactgagctttttcagcaaaaagtatatgtttataaagaagtataggataatttagtaatttaataatgtgacaacatttgcgtgtgtttttttttttgagaaatacaaattgtgagaaacagaaaagtaaaagaagcagcagcagaaatatcactataggatcaaaagattgcaggaaccaaaactccaaaattattgggcataatgtactaaaaacagggcagtggaggaaagggacagtccagactagctctgagggtccaaagaaagtattaaatattgttactggagtgatttgctctgctatttgggcttgggaattaagtgaaattgttgatatactagacagatacttcccacccatttttctcttgataatcagggttcattttttctattttctatttctctggatgctccatttcttaatattaatattaatattaagctctcagtctttatgctaaaaattggttatttaaaacaatttaaatcaacttcagtctaattggcttaagttcaaatccattttaagatcgatattgtgtcctttaaaaattttatttaaaagatatttaaactgatgagaggatactacccattccactgataaactattactgtaagtttgtctattgagggctagttatttggtttaaaaatgctgagattatggaaagtggattggaatattttggagcaatattaaaaacagtatctgtaacaatttaataaacttataaattcctctttctctgttgatctatcttgaaaagacactctatgtctctaggcattccttctctgtggtgtgattggtagacagggagtaaacaacttactgtaaatgggcaccatgccagttggcttcaggcagcatcaagcttgtgactcacagtcagggttaggaaaatgccttttaacttgtttgtctctgcctcttttaaacattaaaggcacaactgtactaattattaagtatttcataaggtcttttagggcttataagatcttttaggaatggcctggaagttattagtactgtttcattgaatctgaatacctttaacatgataatgagaagtttttaaagggtggttttatagttaaacggaatttctcaaattggcttgctccttatgttgatttatttaggatcacatttgggagtttctctgccctactttcaatgtatttaatttactgaccatcactatttggggggaaaatgttatatgatatttagaaaccaagagttttggagtttttcccccattagatgtatttatttatttatttattattttttaaagacagggtcttgctctgtcacccaggctggagcacagtggcatgatcctagctcactgtattcttgaactcctgggctcagactgtcctcccacctcagcccaagtggctaagtatcaagtaagaatcacctggcaaattccaaggctgtataccagatttcctaaattagaattttggggttgggtatctgaattttagtaaagccctccaaatgtttctggtattgcttctaagaacaattgataacataatagctgtggccattataggggtattctgtcatatttagatataagcataccttgttttattgtacttcccaaatattgcgtgtttattttgttttgtttcacttacaaattgaaggtttgtggcaaccctatattaagcgagtctgtcagtgccatttttccaacagcttgtgctcattttgtgtctctgtgtcacattttggtaattctctcaatatatcaaactttttcatcatttttgtatctgttacgaccagtgatcagtgatctttgattttttctttttttttttttttttgagacggacttttgctctgtcacccaggctggagtgcagtggttcaatcttggctcacagcaacctctgcctcccaggttcaagcaatcctcctgcctcagcctccccagtagccgggcctacaggcgtgtgccaccacgcctggctaatttttgtatttttagtagagatggggattccccatgttggccaggctggtctcgaactcctgacctcaggtgatccgctcaccttggcctcccaaagtgctgggattaccgtgccagcctgatgttactattttaattgttttcaggcaccataaacctcacctgtataaggcaccgtacttaattgataaatattgcgcatgatctgactgctcttccaactggccattccctgtctgtctccctcttcctgggactctcaaatccctgagagacaataatattaaaattaagctaattaataaccctacagtggcctctaagtgttgaagtgaaagagttgcatgtctctcactttaaataaaaagctagaagtggctaaacttagtgaggaaggcacatcaaaagccaagacaggccaaaagcaaggactcttgtactaaacagctaaattgtgaatgcaaaggaaaagctcttgaaggaaataactagtgctactccagcaaacatgtgaatgatcagaaagtgaaacagccttcttgctgatacgaagaaagttttagtggtctggacagaagatcaaaccattcacaacattcctttaagccaaagcttaactctcttcaattctatgaaggctgtgagaggtgagaaagctgcagaagaaaaattggaagctagcagaggtcggttgatgaggtttagggaaagaagccagcgctgtaacataaaagtgtaaggtgaagcagcaagtgctgatacagaaactgcagcaagttatgtagaagatctagctaagattactaaataatagattttccatgtagatgaaaaagccttttgttggaagaagatgccatctaggactttcatagctagaaaggagtcaatgtctggcttcagaggacaggctgacattcttgttaggggctaatgtagttggtgactttaagttgaagccaggtctcatttaccactccaaaaatccgaagacccttaagacttatgcttaatctactctgcttgtactctagaaatgaaacaacaaagcctggatgacagcacatctgtttatagtatgcttcactgaatattttaaggccactgtaaagacctgttcaactgctcagaaaaaaatgattactttcaaaatattgctgttcattgacagtgcacctgggctcacccaagagctctaatggaattgtacaacaagatggatgttgttctcatgcctgccaacacatcatccatttgtagcccatgaatcagggagtgatttcaagtttcaaatcagtacattttgtaaggctatagctgctatagacagtgattgctctggtggacctgggcaaagtaaatcaaaaaccttctgaaaaggattggccattctagatgctattaagaatttgtgattcgcaggaggaggtcaaaggatcaacattagtagcagtttgaaagaagttgattccaacagttatagatgaatttgaggggttcaacacttcagtttaggaagtcactgcagatgtggtagaaacagcaagagaactagaattagaagtggagcccgaaaatgtgacggaattgctgcaatctcatgagaaaacgtgaatggatgaggagttgcttcttatggacaaatgagcaaataaatttttttcttgagatggaatctactcctggtgaagattctgtgaaccttgttgaaataacaacaaaggatttagagtattacataaacttaattggtaaagcagcagcatggtttgagtggattcattccagttttgaaagagtttctactgtgggtaaaatgctatcaaacagcatctcgtgctacaaagaaatcttttatgaaaagaaaagtgaaacttcattgttgtctactttaagaaattgccacagccaccccaccttcagcaaccacctctctgatcagtcagcaggcatcaacactgaagcaagaccctccacaaggaaaaagattacaactcactgaaagttcaaatgattgttagcatttttaagcaatattttaagattaaggtaaatacatttttaaagacacaatgctattgcacacttaatagactacagtatagtataaatataacttttatatgtagtgggaaaccaaaaaattcgtctgacttgctttgttgcaatattcactttattgtggtctagaaccgaacctgaaatatctcagaggtatgcctgtattaatattattttgcaagtaaaaaacccagcatataaaaaaaacgtagaatatgttgagagttcagtaatatggatgaaaatgtttttctctaactgaagaacatgataaattataattagggaaggatataaaccaagaaaatatgtctgagatagccaattcttgcagttcataatatgaaaactcattataccaatctcagtaagaatacttttaatagctgttatttctttgggatatagaatttataaagtacacagtaatcttcttatgatcaatcctaggatcactttacaaccacttaccccatattacaatgtagtaccaagacaagcagaccaaattatagaaggacaaagtttttgctaagcatattttgtcatcagcataccgcattgtgtgtgcatgcatgtgtgtgtttgtgcatgtgtgtgattgtataaaatattagaaagccaccccagaaaagttaaatgactaggaatgttgtgaagggattaagctacccctaaaattatataacaaaactctcttcatctattattaggtcatctttagaacatcttctcttaaatttgttataggtctctctcatctgtttggattaaaattggtctgaaagcctaaaatggctttttacctatataattatttcccaactagcttgtagtataggtgcaaagctatcacacttgctaggttagtgaagtatgtaaaaactaccatctttcaattaggaaccatcggatagcttctacaggattgctggggagaacctttataaagaaagttatatctttataaattttttgtcattttacttagctgagaatataaaataagttagctaataatagagtagaaatgttttctgtaacagattaatattgatcaaatgtgttattaaatgctaaaacaccattttttttctctgtaagccatgtgtttcatgccacaacacaaaagggacaattgtctgtgttttatgacagttctgttctgtcagatgctgtttgttcattttggtgaataaatgaagagagccctggacacatctttttttcctcaacaaaagaggaaaattattcttgtctgtatgtctataatcctgactctttgaatggctttaatttttttaaagtcagcatttttttataaagataggtgtttggaatgtgggcgatatggctggacagttagattgggaccaaataatggaaggctttgaacatcatgctaagaggtttgggttttactctgaaggcagtagagaaccattatgtttttaagccaggattgacttgttctaagctgtaccttagaaatattactctggcagttgtacataggatgagctgtatgttgctttgttttgtttggggagacagttctcgaagagagactacatacgaaggcagttatatgagtcattactaaaggtctggcaagaagtagtaaaagcattaactggagtggtagcagtagggaaggaaataaaaggatagatgtgggagtcatttggaaagtatgaggcaattcattgaccttacagaatcactggttttctgcttccactccattcacattgacctttccaaggttatcagtgacctgcttgtccttaaattcagtgggcactttccagtaacctactgttggcaccagccctgtgctagacaccaggatcctgtttgtaaaggcatctgccagtggtttctgtgacacaattctgtttctagttttcctccttctacttctctagcctcttggcaagttcttctttcagagtttctcagagctttgtgctaggccctcttctcattttctccttctctaagtgatcccatccttttctgttgcttcagttaccatttgtccttatgcaaaggacagccatatctactgtatctccagctcagatgtatctctttgcctcctgacccatatttccaactatctaactgggtatcttttcttggatgagttataggtctctcaaacacaacatgtccagaataattcattgacttattctaaggcctgcttcctctttctcctgtagtccctatctcaggaaatatatggtgctatcaaccccaaagcagaaatctggacataatccctaactacccttttcccctctctgtgcacataatttcagtcattaggcctcatagattggactaaataaatacctcgcaaacccttctacttatattcttaactgctcctaccttaagccaggctaccataattttgtagctggatgactgcatcatcatcttgactggctcccttgtcatcttcaatctatattctatactgcagctagagctttcaaacataaacatgtgatcagattagtcccctctttagaacaccctagggttctcactgtcctgagtacagtctaagggtttaccatggcttacagggtcttttatgatttggtgagctttttattgtataacctttctaaactgcctttacttccctctttcttggctctgtgtctttgcataatgctgttccctatacttcacctcacgtctaaccttcatctccttttcacttctcctcttcctccaaaatccagctgaatatcacattgtcatgcaggcccattcttgatctcccacgtttgggttagatatccctcttcagtaccatcaccgcaccaggtgtgtcccctatcctagcatttgcctcattgtattacaactactgtgtactcgtctctacagctcctgctagtctaaaagttttgggagagcaaaggttcatgtttgtgtttttcactgtggtataccccagtgcctagtatatgataagctctcaaaatatttgttagatgtatgaagaaatgagaaagagaacaggaagagggtaagtttcaagactaggaaacaaggctatgaaagctgcaggaaagcagcaggttaaaacctagaagaagagtttgttttaggaaatactgtgttttaaaccactataactgaagcaaaaacccaaggcctgggtgtggatagagtccactatctgataacagtggatactgatgcatggcagagttggagaggaagagagccagattccaaaacagaaggggtaaagtcttctaagaagatagattatagtaagaaggattaggggatagaaatatgagcctgttccactcatagatctcaaacatgaaatgatgagtcatcatgaagagagtaggcaattgtccagtgaagaaggggatgctaacccttcttaaccttgaatctctcaggtagaagcagttagagaaggaacagccatcatcagatagtgttgtaaggaaaatgatatccttggggaaacctgcattttggtaaagcaaagcaactaagaaagaatatactaccactgtttaacaatcgccacaaaaagacagtaggatcatctttgacccccctcatcctttctcaggaacttggaggactaagaagagagaaatctgtagaagaggcttctctctctgatcctccctccacttcagttttaccacatgtaatgcaacaataattaagaatttgtgtaaaatttcaccaggttggcatgcatggagagaaaaattattcagatgttttcctttgtcaataatacaaggagcatttgtagggaaaaatatttacaaatacagtaagacctattctctttctatatttatgggaaaattttaagttgtgcccttgtttcatgtgtgtttctatttaaagataccatacttaatatatattgttgattcattaacattgaactcatggctaacagcactataaatcatgtctgatcaaaacttatgatacatgtactttcttcgtaaggtacatcatagtcttctcgtacatgggaactctaggtagtacttcaggactatgcatagaggccattttaaacagcaaaattcccaacaaaaagcacaaaactcaaaaaatgtgccactaaatttaccatgaaaaggacacttgtttacagtttgagagctaaaacaagaaggtggcgtgtcacttcgtttgacttcagctgggaacatgcatatcagtcgactcaaattttttgctattctgtgcttatccacgaatcgataggaaagcaagtgtggatttgggggttacaaataaaatgtagcaaatgtgtaaacttgcagatgtggaatctacaagtagttagaatcaactatgttagtctgatcattaaatcagttttttaaagtactattgtaacaccttataacctgccccattcactgagtgttgtagtttatagtttcattgggcattttcagtagttttatctgaagtcacatttcaaattttgtaattgaagctccaaagtatgctaccggaaacacgagctgatgctgtgagacaaaatcaacaggtaatccaccatcacaactgtgggctagaatgctcaagaaaccttggaggcccagagagctgagatgaatactgaagaatcataggcaggtttactctgtcaagctgcctgtattttgagggtgtagtcctcaaaccaaaaagacaccaaatgaacaaactcagatggcctcactggggaacagagattgaaagctgacactggaatgtgtacttaaaaaaatgagagcccgttttggaaaggcagactgggcacagaatgtggagagctatatttgctaactgaagaaatttagactttatcctctacaaaacaaagctattggtttttgaaggttgcataaaagctgcattttagcagcatatattttggtagagctgttacctgcctgaaaacatcaatgtcatttcacacaaatgatacttatcccttggtgtttgatctaaatttctacaatgagaatgtgattttatagtctttactggggaaggaagtaggtttttcaggccgaaattcttgtgtagcaaaaattaacacttaagttagcccttggcaatctccagttctataatggtaaaatggatttcccagaaagtcactctctatccctttgaatagacattagaaataacatgtactttaagtgggatttacagaggaagggggcctttaattctttactagtgtgatgccctgtaaaaaaataactaacattagagttgaggcctagaaatagcagcactgggttaaagtctgttttcaagtgcaagtttttctttttattcgtgtgtgtgtgtgtctgtgtgtgtttcacatagaaggaggaaatgccaatttcagttcttacaaatattaatgactgcaacttataaaaatgttacagactatattcttcccttttgtaacagatgagaagattttgaaatttagtctctactttttagtttggtaagacaatttgaataaactgcaataattgcaaaagaattctgaatatttgaacatttgacattttctatgtcaaatatacatttcttgtactatataaacattctagaaaagagagacaggcagggaggaaagtgctcattaaaaagagcttcaccctctctgaaaagggatttcctttacagtgctgtgtactaaagcctgtgttgtaaatcagaaagcactgagcacacatgttgctgctttggtagcatcagaagtcgattttcattagccttataccattcactatttctgccaagcaatcttaaattataaaagaatcttatttgattttgtgattctcttgttttctgctcataaagaaaatatcctaaattgaacaatggcatgctacgtttttagtttttaagacagctaatgtgtaaaaagacatttaaagtatagttgtgttaagtttttgaagtttacagttgtttcaattttgctgctatactttgttaacatattttaggaatatttcattttagtcacaactaggatataaacattattttggtggcgatctccttgtaatcacgacgtcaaccaaatttgggaaattttgatttgttagatttataaattttacagtaacacaaaagtctaatttcctatatattttcaaggcccctatacctttgtcaaaataaagtatcaatgaaaaatgaaaaaatcataaactatgttcaggccaaactgatactgactttgttaaaaggctagatagaaatctgttttcctcttctgttacatctcctcttctggagaccactctgtgtggactgaaggtttgagatcctaggacctaggctagaacagattaggagattgtgctgtatgttaagtggcagataccatggaattctaagcctgttacgaaggaggagaagaagaggcacaatgaccctgacacagcccctgggttgaccacagcagatatctcacttgagcaagtagatatcatctcaattgcttgctgattatctctaacttgtcagtaacttactttgataacctagatttaggagtctgacagcatgcagtgtatgcctcataataatctgctgtttatgaaagtcataacattgtatgtttagcataatggtgaagagcctgccatctggaatggtctacttatttgggatccacatacagtaagctctcacttaacatcatcagtaggttcttggaaactgtgaccttaagcaaaacaacctctaatgaaaccaattttaccacaggctaattgatataaacaagagttaagttcctgtggcatatttctggtcacaaaaacatcactaaacttctaaataaagacccaaaacacttataatattaaccactgaaataaatgtgagctatatatatacatttaagaataataaaaacaaaaaataattatttacccaatttttggtgaaccagtgagtgatagtgatcatagtgatggtggatgaaatcaaggaataaatatttgcaaagtgaaaattgtaagaagcaccccctgtcaccacatagctcagaaataataattagggcaggcttgctgagcatttttaaactgcactgtttattgtcatgcatttgaatgattatcgcagactttatgaattttcattttatattaatttgtaggccaggcacagtggctcacgtctgtaatcccggcactttgggaggccaaggcaggcgggtcactggaggtcaggagttcaacaccagcctgaccaacatggggaatccccatctctactaaaaatacaaaaattagccaggtgtggtggtacacacctgtaatcccagctatttgggaggctgaggcaggagaattgcttgaacctgggaggtggaggttgcagtaagccgagattgtgcccctgcactccggcctggtgacagagctagactctgtctcaaaaaacaataataataatttgtattcattcattttccaatgtgttcattccagttcagggtccagggggcctgcagcttatactcatagctcagagcaactgaccctatagacaggacgccaccccattgtagggtgcactcaaatgcacactcacactcaaactgggacccttcagacatgccagttaccgtatcacacacagcttcgggatgtgggaggaaagcgaagtatctggagaaaaactacacagacatgggaagaacgagccaactctacacagacagtggccctggacagagctgggcaggcatcagttttttttcttttttttgtggggggtgagggtggggcatggagtctcactctgtcacccaggctggattgcagtgcagtggtgtgatctcagctcactacaacctccacctcccgggttcaagagtttctcctgcctcagcctcccaagtagctgggattacaggcgcccgccaccacacctggctaatttttgtatttttagtagagacaaggtttcaccatgttggccaagctggtctggaactcctgacctcaggtgatccacccgccttggcctcccaaagtgatgggattacaggcgtgagctaccgcgcccagtcagcatcattttttttttctcatcaacgttaaaacaatgttgaacaaaacattattcaaagacctgccgtatggctattttctagttgtgtgactttctttgggaaagttagcaaccctttctgagcttaaatgtcctcattcataaaatggggctagtaataatgcataaggtttttgtaagaattagaattaataaagtacttagaccataataactaattagtattagttgttgtctttgctattattttgatgtggtggttgtttggtttcacctgtgtactatcaggacatgctgaaataaaatttaagaattggctttataatattagaaaagcaaacttttgtacgatatgggtatgaaaaattgttgggagtctactttttctctcttacctaatttgtcttagtctttttaaagcttagattttccaaatgagccatagcaaaatataatgtttaaaaatgtttaaattctaagcactatgtcatagttaaataacttaaaggtgctacatcttatacagtccaaaaggaacataattagtaaaattctacaatttagaaaaaaaaatagctgacagtgactgatttataaaagtaaaatatcttttgttaatactaatattctttttataaattaattgatgacaaaaaattgagtgaatgagatttgcagttcatttatctatgatgctggtttatttaatctctataatttgctgtatttgaaagagcatagtgatagaggtcatgataaaatctaggcccagtgccacaactaaatccctgtaggaactctcaaggttttgatttcatctctgaatgggaataacaccttccaagaatattatgaagattaaaaagttacgtatcataaatacacacagagtaacaatactgggaatattgcaacttgtaagaaagaggaagcatatggcatattctgatggttagggatatggactctgtagctgggatgcctgaaagagaactctgactccactaatggctagttatatgaaattgtgcagataatttaacttctctgagtttgcatttttctttgtctatataatggggataataatagtacctacctcacacatagtgttaatttctattagtggttctcattaagatagtattgttgttcatccctggttgttagccatcatgtatctgagttagagagtcattgattttagaaagtcccgaggagactatcaggtcaagcaacctgcctcctgctagacaattagctttatccatgagttaccaaagagggagccgaaacccagggaagctgaaagagctgttgattgtcaccctgtgagttggtgatagaaagatatctggaatcccagtagttgcccatttcctagttctgggctctgcattgcactagaatactgtgccattctaaatatgaaaaggcagtatgaccattgtgcttgtcactttccattccctagatgctatcttatatttgtccttatgaaatttaacctgtgactttcagatcacttagaaccttggttggacagtgttttctagtgttatttagtatatttttttgtcatcttctgttgtctttgggttcccctaaaagagctatactctgggtgccaggaaacttcacacatgactgtcttctcttcctcgacttccctctctacttacctttccagctcgtagcaaatcagaagacttctctgacacctctctatgtctaaaggtcctttgatattctcacatggcggcatgaatcacagtgtattttaactggccttttccttgtatgtctcctacaatgagctgttgaagcttcatgaaaacacaatctgttttactcagggcagttataattccaattacaaagcacatttcctggctcctggctaggaactcgatcatttttcgatgcttccttgctcaggactttctgattccttcttaaaacattttggggcatctccttctcctggtttttggaaacatattctcatactgctatgaaggtttttactgacatttccaacttctcttaaattgattcagcaaatgtttttccataataaatgtcattgatatgtcatcaatatggagagcaacaacagaatgcattgagtaaactcctcccctggaggtctgagaatctagattccagttctcacagagccaccaccttggtgaccttggacagtagaccttctaagcctcagtttccttatcccttaagtggggatattaatagaacccattctcagagatgttgccaagattaaaataaccaagataattcctgtagatgatttggcatagtgcctgccacgtactaagcaagagttagcctccgtcattatagtatgatcataaaaaatgaacagactaaacgaagtaaccagaaggaaagaaattttaattcttaaaatgtaatagtttcttggtttttttttttctgtgaaacacctgcatggcacctttttgttattcatactgttttgactgtggctgtcgtagattcttgttgaaagtctgagagactgagacttgtcattttgaacatggcatcagtggaacagcttatgattcaataattgcatcatcctggacaagcaccagtagaagtgagtcaggacatgtgataaaaagacattcattttgcccctcctccctctctgtattttctttgctataaaattattgatgttaagcccatagtactaatatttcagttcaattcataataaaatttgagggcatttgaatatattatctgttgtaaattataattttatatttgaccacagagtatttgaagtgggtcttttctttccccaaaattctattttaataactaaaaaatattcttaggagaagtattatttaagaacaggtttatattaaataacatcatttcactttcaactttctggtggtcaaaaaatatgctaatactaattaggatatgatacacatgttctgttagaacagttttggcagttagaagacttctcttcttgtgtttgaaagggatgttacttggggtagttatgagccatgtatccagatgtcctgaaaggaccagtggtagatgtatttctatttttgtcttttcttttttctttctggcattctagttgctgagtgactgacttttgttttcagctcttctcacaatcaccattgttctaataactttgcttaaatagaatgtctccttttgctataagccatggggccatttaccgttaattttttaaagtactgaaatgagaacctcataaattaaagaacactcctgattctgagttagcagatcctactaagccttttgcagatggaaatttcctttaaattggtttgttttcctttaacattccattatcctattgttcattctttggagctgtgatttgtttaatatatttcaggcttcttaataaatcaagtcatgtaagttattatttggatcatttcgaaactacaacagcttatcaaacctctgaaagaagaattttgtgtttgcccacagactgaagaactgattcagttttattggctgagctaccttcattattcatatttaattcctggtactgagggtgggaggagggagaggagcagaaaagatacaactattgggtactgggcctaatatctgggtgatgaaataatatgtacaacaagcccccgtgacatgtgtttacctatttaacgaaccctcacatgtatccccaagcctaaaagtttaaaaatatatatttggtaaatcaattgatgtgttttaaaaaatatcgccttttggccgggtgtggtggcccatgtctgtaaccccagcactttgggaggccaagccgggcggatcacgaggtcaggagttcaagaccagcctggccaacatggtgaaaccctgtctctactaaaaatacaaaaaatagctgggcgtggtggcgcgcacctgtaatcccagctactcgggaggctgaggcaggggaatctcttcaacccaggaggcggaggttgcagtgagccaagattgtgccattggactccagcctgggcgacagagcgagactctgtctcaaaaaaaaaaaaaaaaaaaaaaaatcatctttaaagagataactaacccttccccagaaggcagggccaaagtctaaggttcttccaggtcctttgtattccctataaattttagagtcagcctgtcaatttctatacacacacaaaaaaagcctgctgggattatgattggtattgcattgaaattaaatcaatttgggtataagagacttcaatttggggattgagtctatattgagtcttccaatccaggaacactgtatatctctccatttagtcagatatttagtttatttcaacaatattttcagatctttagttcctttcagcaatattttctcatttttcctgtaaagctcttgcacatcttttgtcccatatctattgtgtatatgtgttttgctagttattaaattatattaatataaattttattttccaattgtttgtcgcatatatagaatgttttaaaaatattgtgtcctgtgaccatgctaaattaactaattctagtcattatgtcttcattatctttctcttgaattttcattgtcttccccttctgggactccattcatatgtaaggccatttgatactgtctctcaggtccatgaagttctgttaatttttcttcattcttctttttctctgtgttcttcaactgaatgaatgccattaataatttggtatgtaatggctcacttaaacttccttttgtttttaagatatttctactctcagctgtgtctggaatcctttagtccggagccccaccaaccctcagcctagaaggaaggaggagaaggatagggtgaaaggaaggggagagcttctagcttcaggacagagatcagaacaaacaacagagcagtcatcttggataaggaaacttccctcaaacctattacttatatcctcagaaataagaaaaataatgcatttatcaaattaaaggattttgaaaaagggaacattcagagaataaaactaaactcttgaaagttaaaaggatgataacataaatgaaaagctcagttgaaggattgaaagataaaagtaagaaaatatcccagaaataagagcaaaaagacagcaatgtaaaataggggagaagataagagaattagagaaccagcttaggagttctagaaagagaaaatgtagacaacaaaaggtaagaaatcatcaaagactggagtaggggaggtcatgctatctgtttctttttctattttttattttgagttacatttttttttactgtgaaacaagcatatgtacatgagaatgaacaaaacaaatatgcagtcatgtattgcttaacaacagagataggttctgagaaatgcatcattaggcgatgtcatcattgtgcagacatcatagagtgaacttacacaaatctgaatggtatgtcctacagtacacctggaccatatggtatagctgttgcttccaggccacaaacttacagcatgttactgtactgaacactgcaggcacctctaatacatcggtaagtatttatgtatctaaacatagaaaaggtacaataaaaatacaatataaaagaggaaaaaaatagtacacctgtataggtgcttactgtgaatagggcttccaggattggaagttgctgtgagtcattgagtagtgagtgaatgtgaaggcctaggacatttattatatgaagtctactgtagtgtaaactctgtagacttaggctacactaaatttatagaaaaattttcttcaataataaattaaccttagcctactgtaacttttttactttgtaaacttttaatttttttaacattttgactcctttttagtaacacttagcttaaaacacacacattgtacagctgtaaagaaaattttatgtccttcttctgtaagcttttttccatttttaagatgtttttatttttaaaactgttactaaaaactaatacacaaacacacacattaacctaggcctatacaaagtcagtgtcatcagtgttcaaccttcacatgttatcccactggaaggccttcaggggcaataacaaacacagagctgtcgttttctgtgataacagtgcctttttctgatatacctactgaaagacctggctgagagtgtttgacagttaacaaaaaaaaaaaaggacaagaagtacactctaaaataatgaaaaaagtataatacagtaaatacataaaccaccaacatagtcatttattatcattatcgagtattatgtactgtacacagttgtatttgctgtacttttctataactggtagcacggtaggtttgtttataccagcatcaccacaaacataagcatggtgttgtattacaatgcacagctgcagctaagtgataggactttttcagctccattataattttatgggaccatcactataaatgctgtccatcattgactgaaatttatgtcgtgcatgaccatacatacaatttaatgaaaaataataataataaagctagcagtgtgtaattaccaaccagggcaagaaatagaatattgccaataccttggaggcctccagtatgaccatataagtttacaaatcctattttgttcctcctccccagaggtaaccactgccctgacaaatgtgatcgttgttttcttgtttttcttactacctatataaacatccttaaacaatataactcagtttgtatattttgaattccatgttaatagaatatcatatgtatatgaattttatgtgaatagaatattatatatgtcattttgcatcttgcttttttcattcaacattgtaggattcattcatgttgtagtgtacagctgtcgtttattcattgctgtatagaattatatcctcagagataagatatatggatgtttataaatcattccactattatgaacatttgactagtttgtagtttttatttaaccaaaaaaatgctgctgccaacattcttacacattttactgtatatgcacattaatttatttacaagtataaatttctttttgaatacatatctattgatggagttgctacatcataggacattcttgtctttgactttactggataataccaaactgtcttccaaaatgattacatccttaaactcaggacacatcttattgtcaaatgtttaatttttgtcagtctgatgggtatgtaagttattttattgtcgttttaatttgcatttccctgattactaattaagctgagtaacttttcatatgtttattggccatttggagttcctgtattgtaaagtataagtttttttgtccatttttctagttttctgtccttttagttgaaatccaaatttgcctaaatctgttattctctgagcacaagtaacttgggatgctttcctttagatttagcctaattctttatcattttgtcagcttgatggtgcttttaaggagatatatatgtgtgtgtgcgcacacatgtgcgtgtgtgtatatatatatatgtatatgtatgtatgtattttttgagacagggtctcactctgtcacccaggctggagtgcagcggcacagtcttggctcactgcagcctccacctcctgggttcaagcttttccctgtctcagcaacccgagtagctaggattacaggtatgccaccatacccgctaatttttgtatttaatagaaacagggtttcgccatgttgacaggctggacttgaactcctcacttgaactcctcacgtcaagtgatctgcctgctttagcctcccaaagtgctgggattacaggcatgagctaccgcgcctggcctggatattttttaaaaatattttttatctagcactttggtttttggcaggcaggttggcactcatagtctgacctaccatttctataaaaagaaacctgtaaatgttcttaaacagactttgaaccagtcttcctgattttgaacccctacctttacccccagtttttgagcctttcagaattttttttcataataattaggttgcttcttagctttccccactggtgacttaacagatcttaggaagccaacaatccttgtccatctgctttctgtcttgtgaactgttgctggtattgtctcttctctttattcttagaggtgtatgcttttaaaaacatatactgggtttgagagggagctgaaataaaagcatgtgttaaatataccatctttaaccagaactacatttgactggtcattttattttcaagctcacatacacttcaaacagagatatggctaaaggaattatcatgtgaacaacagccagggctctgaacatcacagattatatcatcatacttgaaatatttgaaattttgattcaaaatgagagctttatagctatgtcctcaatggactaagtgtttaagtacttaacatccaaaacattcttactaatcaagagaagacaaacaccccaacagagaaataggcaaattttatcaatagccagttcaccagatttgttttctgttagaagcgaatatggggaaatacatgtgtccatgttttgcctacttttcctggagcaggtaaggagaggcagtttaaggatccatgtgataaaccctaaagttgtccatcggctttccagtcccttctaggaatttaacttagggaaataatcagacatttgcaaaggtgtgtacagtggtatttataatagtgaaaaaccaaagaatgaccaataacgggagaatggaagttacagccaaatactttacaactactaaagaatcatgtaaaatatctattgacataggagttttatcaaaatgtgaagtatacagatgaatagtaccacacataaaaagcaaggtgcaaattagccatttatattgttatccccaaaataaatagatgcagtttttttaaaagatgcaggctatatatggaagtgtttgctggttttctgtcaaaagaatggcgactttattttctaatttaaactttttgctgttttctaaattgtctaaatagttatagtttttataatgtaaaagtatcttccaatttagcttcatttgacaaattaccttttcattctatctagctatgtaattctaaatgaatttacagcagtaatcttagagcagatgaatttacaacaataatcttagagtagactacggattagatgtaaaaacatgagttgggctttatggttacagagagttttcctcagtgtggggatcatagctgtattgagtttattcagttttcctttcccacatgaatgaaaaatggggccagcctacaactggaagggcctcggcatgtaccactgtactgtgtatgatgtgatttcttgatgctagtagggagagaatcaaattgcctcctattcaaaccaagacccacaaatagcgtcaaccagtcatttcagctactccctgcagtgtcaagaaggtgtgaacccctcatgttctctattgcatacccttgtctaattcagtgtttcttcttcttttcaggttttggctttatgctacatttcagaaatcataataaccttttctggtattattttattctttttcgcactgtgagaaaaattaaactttcaagtggatgcttcttataaactatttatacccttttgctcccttttgggaggcagggacagggacagagttcctcctcaggctaactaagaaaacttactgcttccaatgtaatttaaaagatctccctctttctattgctctctgtactcttaattcttttttttttttttcacagcagagacaagtgaacatttatttttatgcctttcttcctatgtgtatttcaagtctttatcaaaacaaggccccaggactctccagattcaattatgtccttgggcttggtcgactgctgtaggagtctcagggagccttctacaaatgctagagtgactcatttaccaacattaaaccctaggatacatgcaacaaagcaggactccttcctccatggaatgtgccgatttcagatgacacagcacccaatgtagaaaacgctggaatttttccttggaactagactgtgatgagaggtgcttgacatgaacataagctactgtcttttctttttttttgagacagagtttcgcttgttgcccaggctggagtgcaatggcgtgatctcagctcactgcaacttccacctcccaggttcaagcgattctcctgcctcagcctcctgagtagctgggattacaggcacgtgccaccatgcccggctaatttttgtatttttagtagagatggcatttctccatgttggtcaggctggtctcgaactcccaacctcaggtgatctgcctgcctcagcctcccaaagtgttgggattacaggcatgagccaccacgaccggccagctactgtcttttctttgacccttcctttccagtttttgaagataaagcaggaaataatcttctctgaagatacttgataaaaattcccaaaacaacaaaacgcatgcttccacttcactgataaaaaatttaccgcagtttgtcacctaagagtatgacaacagcaataaaaagtaatttcaaaaagttaagatttcttcagcaaaatagatgattcacatcttcaagtcctttttgaaatcagttattaatattattctttccccatttccatctgaatgactgcagcaatagttttttgtttgtttgtttgtttgtttgtttgttttttgagatggagtctcgctctgtcgcccagctggagtgcactggcgcaatcttggctcactgcagtctctgcctcctgggttcaagcgattttcctgccttagcctctcgagtagctgggactacaggcacgtgccaccacacccagctcatttttgtatttttagtagagacagggtttcaccatgttggccaggatggtctcaatctcctgacctcatggtctgcccgccttggcctcccaaagtgctgggattacaggcgtgagccaccgcgcccggccagcaatacagtttttagttactcgacatctttaagcctataactcttaggctatgcatagccccatgtcctaatcaggcattcactgatcccagcaggtctccatctatttgtaccagcctcctctttcctcccaatctcaaggttactcttaaatactagtaaatgcaaaaagaacttgtaaagtggcaaggcatggcctatcaaaagtcagcccaagggcagttttcagccctgcctcacctgggtctagttcagctgacggatgagctgattgatgcgttcaccccgatagccaggtgtgcccatctccttgaggaagcccactctatttttggtagcatgatgggccactgagaggtggaaagggcgcaagaaccatgagatctcctggaaatgcttccctgggaaggcaatttcatgaatgaggtcttccaagcaaatgaagccaaacttccccaggtgctcctcaatcactgtgttgtctgtcagagggatggtcttattcttgaccttggcttgtccacgtttcaaaatgagttctcggacagacttcagatttggaaatccccaggtcacataaggttccactatatgcagcatttttagattctagggggtaacttttacaaagataccactaaaaattttctttaggcgaagtcttgcagtggttctctgcacccgtaaactcacgccatcaatcctttcgatgcgtacaacaaaggccaaggaatgtttatctggcaattccaaggcatgaggtttcacttctagtcgtctgagacgcaccttgtcacgtttctgccgccaggaatcatgtaggaatgattccagtcgcttaaacctgagcccttttcctttcttctgtcttgctactgccatctttctagtggtgcagctactcaattctttttttaattataatttttattttaagttccagggtacatgtgcaggatgtgcaggttacataggtaaacatgtggccatggtggtttgctgtacctatcaactcatcaggtattaagcccggcatgcgttagctatttttcctaatgctgtcccgcccccccacccaacgggccccagttacactcttaatccttatagctcagatgttatgatccacagtgtggttcttacagaaagttatggattaaaaaaaaaaaaaaacactcaaagtgcccgaactttcttaaaataatcctggtacagctaaactcatgcactgactgtccacctaatatttaacagtctgtgttgtgatatattgttttaatgttctgaatgcttgtcagctttcagtattgaagatgtgaatcatttatcagcaatgacacatttagtctaaggttgtcagctatttatgctacaaattaatgacttgtccttaaaatatcaattttgtgattcatgttttggcaggtggttagatgttttgtgttctaattttaaactatggataaaggttttgtcataatcattgttttattggttccttttctcccctgcccactccccaaaaaaccctgcaattcttttttgttaaacttttattttaggttcagaggtacatgtgcaggtttgttatataggcaaattttgtgccacaggggtttgctgtacagattatttcatcacccaggaaataaacacagtacttgatggataggtttttagtcttcattctcttcccaccctcaagtaggccccagtgtctgtccttcccttctttgtgtccctgtgtactcaatgtttagttcctagttataactgagaagaacatgtggtatttggttttctattcctgtgttagtttgcttaggataatggctgccagctccatccatgttgccgcaaaggacatgatttcattctttttatcgctgtgtagaattccatggtgtatatgtaccacattttctttatgcagtcttctgttgatgggcttttaggttgattctatgtctttgctattgtgagtagtactgcagtgaacatacacatgcatgcgtctttatggtagaatcatttatattcctctgggtatatacccagtgatgggattgctgggtcgaatggtagttctgttttaagttctttgagaaatcatcaaactgctttccacaatggctggattaatttacacttccaccaggagtgtataagcatttccctttctctgcaacctcaccaggatctattattttctgactttttaataatagctgttctgactggtgtgagatggtatcccagcaccatttattgaatagggagtcctttccccattacttgtttttgttgactttgttgaagattggatggttttaagtgtgtggtcttatttctgggctctattctgttgcattggtctatgtgtctgttttgtaccaataccatgctgttttggttactttagccttgtagtagtttgaagtcgggtaatacggtgcctccagctttgttcttttggcttaggattgctttggctatttgtgcccttttttgattctatatgaattttaaaatagtttttttctaattctgtgatgaatgtcattggtattttgagagcaatagcactgaacccgctaattgctttgggcagtatggcgattttaacaatatcgattctttctatcccctgcaattctttgttgttgtatttaactatttttacttgtgaagttttttcagggatgattttgttgaaagtgacaactctaaaaattatgttggtaattaaaattttaagtaatgacttttattttcagagattccacttctcttagactttggagctgttaacagcagtgtccaatctgcagtggtactcagcagtttctgtttcctgcatgcagaactgcttatatgaaaacacagttttaaaaatgctttcttatggctgacattcacattcttattccttttgattcttttcaagagggatttggtttgttaaaattaatttttgcaatacttttatgaagatacaaactctgacaaagcttttaaaacaagtttgagagaatacagtattgatttcacttgtaaatctgacgattattttagaaaaaaggaaaatattatttactattattttgcttataaatgtttatcaattttaaagcttccacattgcacatctcccactacaacagtagctaccatttattctttctcaaaaaaagtgctaagtgtgcccttgaaatttttacattgtgcagaatatccctaaaattttaaaacaaaaattacatcatcacttgctttaaatgtttcttctttatttaacatacagtttctaaaatgttagcaaatagcattttagaagagacacgttacttttctaatgaatgttctaaaatgaaccacagtaacctatacttacttagactgtgaaaaacaaaacttatattctattgttaaattttcaaaagtgaaactacacgatagtttacttggcacatcactctgttattgtgaattgacaaatgtatatgtagacaaatatgtgaaaatcagagtacatatacattatatgcagcaccacaatacattttttagtatgttttgactgatatttaattatataatttaccaagaggatctcaccagaatgtagaaaagtattgaattttagaacaattcacatatttaaaaaaaatgtagtcagcccttttatctgtatctggagaatgcagggtaaaggaataatacatgagtattggtatttaaaaaaaggtgttaatttcttacctatgatacctgttactttgggtatcatttaacctttatttctgtgaaatagaggagttctaacatcctctaattattataatattgttctaatttaatctatcttaatctgtgatacagtttgaaaaccaagcttttactattggcatgtgcaaaaaaataaagcagcagtagacttggaatcttgaatgcaaatttagattttgcctcttaataaatgtataatatagtgttctgggaccaattctctaacatttctgagtcctagtttctgcatctgtcaaatgggattagagatacctactttcaggatgtgatatggtttggctctgtgtccccacccaaatcttatcttgaattgtaatccccatatattgagggagggacctggtgtgaggtgtttggatcatggaagtgatttcctccatgctgttctcgtgatagtgtgggagatcgcaaaacatctgatggtttaaatatggcagtttcccctgtgctttctctctctcctgccaccatgtaagactttccttgcttcctctttgccttctgccatgattgtatgtttcttgaggcctccccagctatgcagaactatgagtaaattaaacctcccttataaattacccagtctcagatattctttatagtagtgtaaaaactgactaatacagagaattggtactggcagggttgggtactgctataaagataatctgaaaatgcggaagtgactttggaactgggtaacaggcagtggttagaacagtttggagggctcagaagaaaactggaagatataggaaagtttggaacgtcctagagacttgttttgaatacttttgaccaaaatgctgatagtgacgtggacaatgaagtccaggctgaaatggtcccagagatgaggaacttattgggaactggagcaaaggttatttttgctatgctttagcaaaaagactggcagcattttacccctgccctagagaactgatgaactttgagatgatttagggtatttggcagaagaaaatttctaagcagcaaagcatcctagtggtgacttggctgattctgaaagcgttcagtcatgtgcattcacgaagatatggtctgaaattggaacttaggtttagaagtgaagcagaacataaaggtttggaaaatttgcagcctgaccatgtagtagaaaagaaaaccccattttctggggaggaattcaagccagctgcagaaatctgaataagtaacaaggagtaataagtaataataagtaaaaagtaataagtaataagtaacaaggagccaaatgttaataaccaagacaatggagaaaatgtctccagggcatggcagagatcttcggggcagcccctcccatcacaggcctgagaactaggagggaaaaatggtttcctgctcagggccttgctgctctgtacagcctcacgacatggtgccctgcatccctgatgctccagctccagctgtggctgtaaggggccaagttacagctcgcaccattgcttcagagggtgcaagccccaagctttggcagctttcacgtggtgttgggcctgcaggtgcgcagaagacaagagttgaggtttgggaacctgtgcctatatttaagaggatgtatagaaacgcctggatgtccaggcagaagtctgccatggaggcagagccttcatggagaacctctgctagggcaatgcggaagggaaatatggggttggatccctcatacagagtccccactggggcactacctagtggagctgtgagaagagggcctctgtcctccaggccccagaaaggtagattcaccgacagtttgcagtatacgtctggaaaagccacagaatgccagcctgtgaaagccacaggggtaccctgctgagccacaggggcggagctgcccaagggtatgaaagcccaccccttacttcagtgtgccctgaatgtgagacatggagtcaaaggagattttggagcttttagatttaagggctgcccagctgggtttcagatttcatggggcctgtggcccttggtttgaccagtttctcccatttggaacaggaacatttacccaatgcctgttccctcattgtatcttggaagtaactaacttgcttttgattttataggctcatacgtggaagggacttgccatgtctcagatgagactttggtcttggacttttgagttaatgctgtaataagactttgggggactgttgtgaaggcataattggttttaaaatgtaaaaagacatgggatttgagagggagcaagtgcaaaataatatggtttggctctgtgtccccacccaaatctaatcttgaattgtaacccgcatgttttgggggagggacctggtgggaggcagttggatcatgggggggttttttccatgctgttcttgtgatagggagttctcaggagagttgatggtttaaatgtggcagtttcccttgtgctctttctctctcctgctgccaggtgagacgtgtcttgcttcccctgccccttccaccatgatcataagtttcctgaggcctccccagccatgcagaactgtgagtcaattaaacctcctttccgtataaattacccagtctcagatagtatctttatagcagtgtcagaatggactaatacaggatagtaatgaagattacagaatatgtagatgaagaagtgctaagtaaatagcagctattattatgtagtcaaattgaatgtatacattgtggtacttcagtgtcctttaaattgaataactagaaatttgttggctttctcaatctgctcacatcagatgacatgttaatttatgcctatacttttttctagttaatagatataaatctattcactcaacttctattgacagaactggtagtgtggcaagacatctcatttctagttaaggctgtataatattaagttcattttacttaaattaactatggtttgggaaatgcttttcatgtcatcatgtatgcccaatttgatactttagtgggacagtatatttcagaaaaaaacaaatgcttccccaaaaattccagggttgaatacattagtcagacatataacaatgtacttcagagttcctctaagggcaaaaatcgtggtatgaatatacaaaacactcctatttatacttttgtatttttgaaatgtagtcttcatgttaatttagcatttcaatgaccagcatgacattatcttaataatttggaatgccaatatgttcatttaagacttaatatagtaagtatctaaagaaaaaaatggaagtgactgaatgcttttgtatctcttaattataatttgtgctccattgtgatatgaaggatagaaggggcaggatagatagaaaacagaaattaactttgatgtttaaccttaccttaagactgtctgttaagtgacccacataatcttaaaaaactctgtcaagcttaatggatgctactctgcaggcccctgccaggcaacagtcacaaggttatgaggtgcatagattttggaattaggcagagctgaattcagatccaggtgttgccttataatgcgactttgggcaaataaaaggcccaatttttgtattcttatctgtaaaatggactcagtaaaaattatttgagataatttatttgtgtactgtacctaggcatgcagcttgacacacagaattacaagtcagtagtttccagtatgattattattgtgaaagagatattttgtttcacctactgaaaacttttttcagtcttaaattttttatctaactggctgtattgcagatgtctgctatataacttttatataattttaaaaactatttctttcctccttgatcttctaggggtaaggttaccaatgttttcattatttactaaatatagcagcccccaccccttattcatggaggataggttccaaaacccctagtgtatgcttgaaaccacagaccacagataatcccaaatcctatatgtatattgtttttcctatacatacatacctatggttaatgtttaacctactaattaggaagagtaaaagagtaatagtaactaataataaaataaaacaattgtaacaatattccagcatcactattcttgtgctttagggccaccattaagtaaaataagggttacttgaacacaagcactgtgatactgtggcagtccaactggtaacagagatagtgatgcggtttggctgtgtcctcaccagaatctcaacgtgaattgtatctcccagaattcctatgtgttgtgggagggacccagggggagctaattgaatcacagggtctggtctttcccttgctattctcgtgatagttaataagtctcacatgatctgatgggtttatcaggggtttccccttttgcctcttcctcatttttcttttgccaccaccatgtaagaagtaccttttgcctcccgccatgattctgaggcctccccagccctgtggaactctaagtccaattaaacctctttttgttcccagttttgggtgtgtctttatcacaagcatgaaaatggactaatacagtaaattggtaccagtagagtgggtgttgctgaaaagatacccaaaaatgtggaagcgactttggaactttggaggactcagaagaagacgggaaaatgtgggaaagttaggaacctcctagagacatgttgaatggctttgaccaacatgctgatagtgatatgaacaataagatccaggctgaggtggtctcagatggatattaggaactttttgggaactggagcaaaggttactatgttatgttttagcaaaaagactggcagcattttgcctctgccctagagatttgtggaactttgaacttgagagagatgatttagggtatctggtggaagaaatttctaagcagcaaagcactcaaaaggtgacttcggtgctgttaaaagcattctgttttaaaagggaaacagcataaaacttcagaaaatttgcagcctgacaatgcagttgaaaagagaaacccattttttgagaagaaattaaagctggctgcagatatttgcataagtagcaaggagcctaatgttaatccccaagaccatggggaaaatgtctccatggccatgtcagagaccttcacagcagcccttcccatcacaggcccagagacccaggaggaaaaagtggtttcgtgggccaggcccacggtcctcatgctatgtgtaggctagggactttgtgccctgtgtcccagctgctccagctgtggctgaaaggagccaatatagagctcaggctgtgacttcagagggtggaggccccaagccttggcagcttccacatggtgctgagcctgtgggtacacagaagtcaagaattgaggtttgggaacctctgcctagattttagaagacgtatggaaacacctagatgcccaggcagaagtattactgcagggcagggctgtcatggagaacctttgctagggcagtgcagaagggaaatgtgggattggagccctcacacagaatccctactggggcactgcccagtggagctgtgggaagagagccgtcatcctccagaccccagaatggtagatccaccaacaacttgcaccatgtacctggaaaagccacagacactcaatgccagcctgtgaaagcagccgggaggtaggctgcaaagtcacaggggcggagctgcccaagaccatgggaatccatcttttgcatcagcatgacctggatatgagacctggagtcaaaggagatcattttggggctttaaaatttgactaactcactggatttcagacttgcatgggccccgtaacccctttgttttggccaatttctcccatttggaacagctgtatttaacctgtgacacccccctaccccctgccccccatccctccggcccttgtatctggaagtaactagcttgcttttgattttataggctcataggcagaagagacttactagccttgtctcagatgagactttggactgtggacttctgggttaatactgaaataagctaagactttgggggactattgggaaggcatgattggttttgaaatgtgaggacatgagatttggaggggccaggggtggaatgatatggtttggctgtgtccccaccctaatctcaacttgaattgtatgtcccagaattcccatgtgttgtgggagggacccgggggtgggggtgcagtaattgaatcatgggggctggtctttcctgtgctattctcatgatagtgaataagactgacgagatctcatgggtttatcaggggtttccaaaacttttgcctcttcctcatttttctcttgccaccaccatgtaagaagtacctttcacctcctgccatgattctgaggcttccccagccatgtggaactgtaagtccaattaaacctctttttcttcccagttttaggtatatctttatcagcagtgtgaaaacaactaatacagatggctagtaagggactaaccggcagggagcgtctccagtgtggatatgctggacaaagggatgattcacgttccagggcataagatttcattactcagaattgcacagaatttaaaacttattaattatttctggaattttccacttaatgttttcaaactgtggttgactgcaggtacctgaaactgtcaaaagtgaaaccacagataagtggggagtcctgtacctaagattattcctttaaattgtttcagtggatatgtagggacctgagtgtgaagtgagagcagcagcatcaaaacctgagggaaatccagatagcaaaagaaacttgtctagtatactggcatgacagagaaaccaaaaagttctcaagttaatgtgagaatctaagaattaaagaattaagcctttgcctttgagggaaggaaaggggtaatgtggctttaaatcaggttgagattggttctgagggttccttttccttcctttatattgatatgaatatagacacaactgttctgcatttccatttgtttttataaatgtctttttaggatttaggaactgctaattatgcaatatgagatatctgttagtttgaggaacatttgaaaatttggtcaaatgacacagatcgtcacacagttttaagacaaatgtttttacctatttgacctagtctggcaatccctatttgggcaaaaatcttcatttgcaggtcatgattggaggcaggcacagaaaaaaaattgccaccttttttgcattatgtcatcaagacatcaaacttcagcctacaaagtagaaagtgttatttctcaagttgaaggcctggatatacctcagcttctcagttctgacactttatcatagtggaaaatgaagaagattgcttaagaacactgatgttggtgtcagaaagacctgggtttgaaccctgactttactagttacttagatcactttaggcaactcaacttttctaaatcttgtttcttcatctgtaaatgctgaaaatagtacccacctcttaggtctgtggagaggattaaatgagataatctatacaaagaaagagcttgcataatagtgccaagtaatggtgaggttatacctgtattctgattataatctcataaatatttaccatgttagctgtctcagagttcttttgcaaaacagataaagatagaaagtataaataagaaaaataagtgaacatatactgaactttgtacaagatgctggcgatatggagagacccaagacatgggccctacctaaaagagattattgatagaaacaggatacatatacatcaaaaggtaacataggatcatctgtgcaaagtgctatatggcagtgttttaggaagtctagaagctgtcatggatcaggaataccatggtggacacttcaggcagggaaaacagatcttagcaaaagctactcctatcataggtacttgataaatatttgtagaatccaggatccctgtagtgataaagaaactacatggattatgtaggggagtgataagacatatgactggaaaaataaaaagaccaaattatggaccatactgagcttgtactataaacagtggaggagcccttcagatttttaatcatgttgagaaaagagttttagcagtgtgtgggggatagaatggaaagagaagccagtgccagaaggactacttagtatcaaccattgcagtggttaaagcaagaggtgagagaaggcatgcattagaatggcagcggtcagagtggatgggaaggaataggtcctgacatagtgttacagggagtaataaataggatgtggaagatgggttagaattggcaaaatctctgcatgtaagtctgggttactaaatatagtgagagaaattcaaatctctctttaagaatcgaataaaatatttagaaataagttactgttgtatttgaggtgaacacaaatggcatttcaaagatgctcgagataccttgttggaaaaagtcaataactgcactattgtctccaacatgttcttgccttctctgaagacatcatgttcctaattctgaattatgaaccatctattatccttgtatgctcttatgtgtgaggaaccataaggtgggaacaaaatccggtcttcattctagaaataactatgcgatcaaaaagtttttagtctttcttcttaccatactggttcttggtattctgtttaccattcaatgtactattattgcttctgcttaaaactcgcatcccctaatgcaagcctgagcaaacagaactgataacacacagcctgagaagggagtgcttggggtctcaagacttattctgtttttctccatctttgacacttggtttgaagagcaaagaaggatacagctgttaggaagtaagttacccaaacacagtgaccaaactggattaattcttccaatgagaaagaaatacattatttctgtgagacagattagactttaagtagcatagataacatgattatattctctctacaaataaatacacaggacctaagaaaccctttacagatccaagtgttttcctctccacttttccatccccaaacccatcttgcaagatatggccagcttatttggagttaattaaatcaagaccttcgttttacagacagggaaaccaagcccagagacactgagtagtaggccactggtgtcttagaggtctgaaaaatcctttactgaacattctcttgatctattaatgtataggttttgttgctgtaaccctctccccaagaggagtgaatataaatgatgcagagtttggatgaactatcttaataagaacctaaagttgaaaccaatgcaaacctctctcaataaatgcaaagcaaagagaataatcagtctttctttggcttgttaaataagataaaatgtgttctgctaaaaccatttaacagaaatattgtgaaaggtttcccctaaagcatttttctatttgatttgaaaactattccatagcttattatcaaacaaatcagtaattctttagctaatgcagagataaatgggcagtcagaaaatataatcacctggtgtgtgcagctgagtatttacatttttcctaatgaacaaagataagaaaagtgcaggtgactttaatgtgtaaaaactaccttttagtgctagcgctagagggaaaaagaaattactggctcaagccaatcctgtacttgataactaagccgtatagtccatggcttggcttcagttctgttttgaatctctttttggacttgtcttgaatggactgtttagggctgcttcagtagtgcagttgttgcatttttaagcatagtttaggttttaaaatgtttctggtccctttttttttttcttttccactttatgttgcttaaagctttatggccaggttttctcatcctcagcattattgacatttgaagctggatacttctttgtggtgggggctgtcctgtgccttgtaggctggttagcagcatccctcgcctcttctcacttagatgccaatagcatttccccaaccgtgataaccaaaagtgttttcagacactgccaaatgtctcctagagagcaaaattgctctctgttgagaactactgtgttacggtgtttggacaaaaactgacaagccaatgggaatattctattggtagttgtaaaaaattaatccagttatagcagctgtatttctggaatttttttccatattaacacttgctttctgaggtgataatatctttgttttttttctcccaaatagatttcttgcattacactgaaaaattgctgattaattcacttaaattgaagactaagccaatcatgtcatttgggtaatagtttaccaactctgcccctttctctgtcagggaagcctctaatttagtaagcgatactgtatccttttgtcaggtacattaccattcctattagcaatagggcaattgagattgagaaagattaaaaggtcaccaagctattacattgtagaattaggttatgaattgtagcctatctggtttagaatctttaccttactagtctccataacaacaattcttccagtgtggtccatggggccctgggagtctccccttaaagggcagactattttcacagtaacacgtactttatttgccatttcattatgtcagcatttgcaataatggtacaaaagcaaagatgagtaaaactgttggcatcttagtatacagtagttactgtattcactgtcatgcacttaaaatctttgaagaagcaaaaaaattattaattacattaaatttcaacccttaaatacatgtggtctttctcatgtcagtgtgacaaaatgagaaggtgcataatccacttatatcgcatatagcatttgatagttgtctcaaagaaaagtgtataagattaaactgtgagttaacctactttttttcatggagtaccatgagagataaactctggttttcagccttgggtatttggcgatgttttcccaaaaatgactgaagtaaacttagcactttaaggaaaacaacttaaagtatttgttgccaattgataaaatataggtttcaagcaaaaatcagaatttttgaagacttgtatctgccactgtgagcttgacaaatgtgactcttttatattacataatgaactatgtcaacatttgaaagatctgcataactcagtgaaccagtattttccagatgactaatgcatgataatacaaaatcatgcatgggtaaaagatacattcaaagtgcaagatagactgacatatttcaatgtaacaatcaaaagttcattgataacagttttggattccacattgcaatactaaaacctttaaaaaacgaaattgtccaattttggtgtagtaatcagaaaaggcaatctataattacctgaacttaagtttctggaggaccattaaccttctacaggctcatggggaagactgtagcacttctctttccctaagatcctccagaaaggaagaaggtaatccttgggggtagggtagagacctattgtgtgatgatcaccaagtatgtaacaatgctttatataactctaatatatataatccacacaaaccccctaaaatggcactaataagggaatggactcaaagaagttaagtcagctagccactgtcacagctattagagcactggaactaggatttgaacccagatttgtctgtatgtaaagctgattctcttcgtaatagtactgagacacaagaggcggctacaaaatattctggtactccatcctagaccagagtttcaaggttcgttatcatttgtagcatgatactggatcctcacagtgcttgcctttcattcaggtgccaggaaacgtctgcctgaatgaatgggtgtaatttacctgcacattttacatgcttctctaggtgtgtgattaactcataatccatccatgactttcacccataatcctccttgtagcaattgctttgcttgcaacaaaactaagtagacatatctagctttatgcatggttttctctctctgaactctaacataaactcagcctcaggaattattcggtttctactacatttgccattctgattgggaaccaccagcattcaggtattcacctggaacaaggcattttgttccaagggttcctcacttaaaagcaagcaccctagcaatagttcataatggaacttcttaacattctcagaatgtttggcacagctgtgagtgaacacacattgagcaatcaataactattacagataatgatgcccttaagaccaggatattttagctttcccattcaaagggggtgaaatatgcactcttactatggtatacttttggttccttctgccatgtatccttaataaaagatgtcaattccatatggttttctcttgagttctaaccattttgttgtaccctagcccttttaacaatatcaaacttgcaactgaataccatttagcattcatccattttttccaatggtgttcattataggctatcttactcctcctatttgtatgacaaaaattggcttttttcaccgatgtctatggtacatctggcagctttccatgtactcagttcttatctgatgtagcccagaacgactgcctgaagggatgccaaaagcctgattgaggttccaaattttcagctactgtactatcaatccatttgttcatttttactttcccttgtcatctgtagcttacagttgagtggcctgaacatgttttgcatacattgtaatatctaagaatttgggaatacggtcctaggatttagacttaatactaccttccatttatataatacttactcataaaatcttcagtgttcctgaaaaagaaaaaggaacatgtattgagtgcctgctagaagcaggaacttgtagtagattttctatgtgttaccttattttcacaacacacacacaggtgatatccttcccagtttactgatgaggaaactcaggggtcaaagtagtagatacctacccaaggtaacagaagctgtgaagtggtacagctgggatctaaaatatgtcagcttcaccgtagataggctccctgatgaaccacctgccacggcccgtatgaccgcatccaggggtgatgatgtcattttcacagggttattgagagctaaaactacgaagtactacaaactattatttaaaatataaatacatactatatatgcatatgtgtgtatatataattaatggggtaaacattacagaatactgtcctaacctttaaacaatgcactcgttttctgtaaactaatatacaaacaactgtttggtccctaaaaatagatgtcaggtgacagagactggctgagcaagaataggagtatcttcagaatagaagccagaggagtttttgcttccccaacacattgtcgcaccattcactgttccaggaccttcctacttctctggaaaactctggcccaaagcagctcctctacattagtcacaagtttccattaatcaggggtggcctgtgccggacctacagcagagtcatttcaggttattctgttacaggctttcgacgtgtagtcagtccactcgcccaaatctagcagggaatgaatgccttgtaatacggaagcatctacaaattcttcttaacagtgttcagagaacaatgtgaaaccctggggccttttcccagaattagggtggtgggaatgctgtcctattgactaagcctgttaggtaagcaggcagttggcaagattcaggaagcttcatttgaagatagaatttagggcgatcgtttggatttactggcttaattacttaaggtaacatttataaaagaaattgtcattccattattattaccttttaacttttattcctaaacggaacattagcaacaaactacattacttgataaatgtaatttctaaccagattgataactagaaaaaaattttaagttactttgctctgtgaattagtttaaacatatttgtaattgagacttactactgttattggctgaaataaataaaagcaagagataataaagaataacagagacaacgaacacccaatttaagtttatttctaagttccatcttttttagagaaaaggcaaattaagaaaagtttagagagaggtactagtatatttatgaacttgtatagatgataagcaaaacggactttaatatgtagaattccagaatcaacaggttgccagcatccatgtttttgaagatttgcttaagaacacaaccaaaaatggaatgggcagtctctaattacaagcagaaggctacaaaatcattttagctgcataatacagttttggttctaaagtcagcacgtaagaggaaaattccttaggaaaatacaacattgaaaaccattgtgtcatgtaatatgaaatgcaataattaatttttcctccagtaatagaaagatcactgtttcattggtttataaaaatatatctttatcattaaatgtggcaaaatgttaagacttggtgaatattggtgaaaagtatatatccattgtacaattctttccaattttttttgagattgaaaatttttaaaacaacaaattatcttttaaacagctaataatcactagacctgcactctttgtggtgagactatgaaaaatgttagagacctagtaagagaagcagattcacatttctgtcttcttcttcaagccaaacagtcatagagtggagtgggcagaatggaactcacttttgaaagcctagtgctttgtccaatcttactgcaagccagacaggaaggttatagaaaatgtttctggatcagtcttctctgagtcatatgaaattgtggtttcagccaagatgacattaggaattagagacatgggacaaaaactttaagattgtaaaaaaattttgactctagtaggaaacatgggtagaattgtaatgacacttgattgaattttaaaagatgcctgtataagatcttaaaattaggaaaaaaattatggcctaagcaattaaaggcataggaggcatctttttgggatgatggaaatatcctctctcctgattgtgatagtagttacatgaatattcatttaacaaaaaccataaattatagacttagaaaacagtaaatgttactgtatgtgacaccttaataaacgtgattataaaaataaatcctaagcatctaaaaaaaaaaaaaaaaagaagaagaagtgaaccagaaccacaccattctattttggagacacttcaaaagaaatgacctcattcttaattttgtttaaagaagaatataacatgatttgaatatatttagctaggatattttagtgcctgctagcacttgaagccagagttcactgtgagcattctgactatgaagtgagaagctaagagaactgtattttgatattcctttgacagttaaatcataacactgttcttccccttctttagccccagcatgagaccagatgtaagctctcctccatccagctcctcaacagcaacaacaggaccacctcccaaactctgcctggtgtgctctgatgaagcttcaggatgtcattatggagtcttaacttgtggaagctgtaaagttttcttcaaaagagcagtggaaggtagtgtgtgttttgaagagtttatttttcctctacttggttttcatttctcagggtggattttgaaatttccattatatgcaaagcccatgaaaggctaaatatcagttaagaggggagaggagggtggctcctaggtcctctaatgggcaggaaagtatttaaaacaacaatacaaaaagatctagaataaaatagaaaagtacaagttgatgtctgggagtttggtcagggagcataaggtaacactataagaaagtgctatcatatgaaatgatggtgttaagtttgggcataacataatgttcattgtattagaaacatgggctttaacttccataagctaataggtttcaaagtcaccaactttactggcctggcaaaaatgagtcacagtgagaactgtgacaggaaaaaaaaaagatattcatttcatttcttattcattttttttttctattaagccagggcactgtgctaagtggtataaataccaataagacctgatccttaccctctgggaagtcacactccactgaagtgaaagatgagttaacaatgacaaggtacagagattataatatagatgagggagagagaaactcggcctgaggaggtcaggaaaggtattttagagaaactgatttcactatataaatgttgtattaacacaaatcttactttgttatggattcagactgctgacagggcaacagcattatctccctaaagaatgagaaattcattccatagcaaatttattagaagagagtctaaaatgtcctaatactaccagtgactcctctaggaaaaaaattgtcatataatttagttatttctaaagcagtttgaaagtagcttggcctaaagctctgattatattaattttttaaagaaacaattattcattcactgtatgaggattattattatttgtctcatgttgtgtttgcatatccatgagagttagatgagtcattttcttttgttttactttttaatacattagcaaattataaaattactcatattacaccacaaagattacaaggatggcagctttggccagtgtagtagtcccacctattgattagagtcaaaagtaaagcccagccctgctttgtgcattgctcctaataaagtggatgttacttaacacatacgcagaagacagaagcgtcttcgtgtcctcactttactcctcactttcttaactgcttaagtatttccacgatataaatgcagtgataataataatacggacagtccctgacttaacgatttttcaacttttatgatggtgggaaagtgatacgcattcagtatggctcctcgacttacaatggggttgcctccagataaacccattgtgaattgaaaatatcttacacttagcactccattcttaatacctgctagaattatagattatccctcaaaattggcatagtataatatgggtatcagcaagttgttgcactttattcagagctttacactaggcaggggtgggctttacttttgactctaatcaataggtgggactactacactagccaaagctggcatccttgtggtctctgtggagtaacgtgagtagcattataatttacatcccccataacaaatgatccaagagagtatgtgatcaatgcagcagaactattgtcttttattatctgatttcacatgtaacatgccatcacttctgccatattttattggccacacagaccaatcttggtaaaggacggaaagggactgcacaagaccatgcattcaaggaggcagagatcactgggggccatcttgggaggctggctaccacacccaccataaatagaaaaccagaattatttgccaaaaatagactttaaccacaaaaatgaataccatataaacaaaacaaagtcacaaaatttcagctgacttgaagactcatctttctattagttagaaagggaatttaccaagtagtagaagacacaggaactccaaaataagatatctcattgtcttatcagaagggttgacaggaaaatgggctgggcactgtggctcaaggaaaatgggctgtgcactgtggctcacacctattatcccagcaatttgggaggccaagatgggaggattgcttgaggcctggagtttgagaccagcctgagcaacataacgagaccccgtctctacaggaaaaaaaaaaaaaaaaaaaacgttatccaggcatcgcacctgtagtctcagctactcaggaagctaaagcaggagattcaggctgcaaagagctatgacacaccactgtactccagcctaggcaacgtagcaagaacttgtctaaaaataaataaataaatgagtcaaggaatgaatgaatggattgacaggaaatgactattagttgtacgtggccatgtgttatgaaatagtgaatactagttaaaactcctcattttatagataaggaacagatagatagacttgtccaacttcatgctaataaccacaaagggctatttttaacttatgaaggtacattgcctctgatcctatagctcagagtcttagctgtgcacaagacatacctgggataaagaaatcaagattggcgtaatgtgcacatcctgacatttcagttggatataaacaaaactttggaatttttcatttttagcagtgggtgattttttttctttttttcttccagtaactgtaggacagtgatttagagattccttatagggtataacttttttgtattataaccacttcatcaatagatgtatctgttgatcgtacttttgatttataggggatagaattgggttagtgcttccattttctgtccaagtaaagaagctaggatatttatagagtacaaaaagaaattgaaacagctggtacagatatttggcattggagagcagctctgaacaaaggtgaattatagtctagtggtcaattttgtggcctattctttacaaagaattgaacctgatacagttaaccatctaccccaaactattatttgtttaaaacacaatctattggctgggcgtggtggctcatgcctgtaatcccagcacatcgggaggccgaggcgggtggatcacgaggtcctgagatcgagacaatcctagccaacatggtgaaaccctgtctctactaaaaatataaaaattagccaggcgtggtggcgtgcacctgtaatcccagctactcgggagtctgagccaggagaattgcttgaacctgggaggcagaggttgcagtgaggtcatgccactacactactacactcccagcctgggcgacagagcgagactccatctcaaaaaaataaaaataaaaaaacataatctatcaaactgtgtaaaacacagtttatcaaaaaagtagttacccttggtgggtactggctggaattgggcagaaagggggcctgttggggtactgttctgtttcttgatctgagagctgattacataaaggttcttggtttgtaaaaatttattaaatggttcactgatttgtgtactttttttatatgtgaatactgcaataaggttttttattgcactgttttcagtttgttgaacagaaaaagggagactctttttgttgtttttgacctctcgacctcataatggcaatgtaggcaagaacattccctcaaggcaatacctgtgggtgtcttggttatattccaccggaaacaaagacagaggctgtccttataaaatatgtttgaagacctgtgaaactttaatagtgccttttattccatataggacagcacaattacctatgtgctggaaggaatgattgcatcatcgataaaattcgaagaaaaaactgcccagcatgccgctatcgaaaatgtcttcaggctggaatgaacctggaaggtaatataaatatctgaaagcaattgtttgtctctgtagcttataaaaatttatcattttacttttgaagatacacgtaagcagatgtaattaatgtagtcagttcagtatatatatgcttgactagcataatgttactgcccaataaaaatgggaaatttttttcatgaatatgtcatattgtttgtttatccaccagttcttcttacacacactgaattcagtacagccagactatatacaaagaaaggaaattatgtaataatgaaacttacacaacatgcagcaactttattattcttactccttttttcagcctcaaaactattccctagggttggaaatgtttctgtatcagacatatttacatgtccatttttctgtttgccttttaaaagcataccttttacttggagatctgtgttttattacagatcttcaagcggggggtggtgggaaaaaaaaaacctcaaggaagaactggatgggttttgttttggttttcaagtaaagaagaaacctgggccgggtgcagtggctcacgcctgtaatccccgaagtttgtgagaatccttctgtctagtttttatgtgaagatattaccttttccaccgtaggcctcaaagcgctccaaatatccacttgcagattctataaaatgagtgtttgaaaaactgctcaatcaaaagaaacgttcaactccatgacctgaatgcacacaacagtgagaagtttctgagaaagtttcttggtctccccgcactttgggagaccaaggcaggcggatcacgaggtcaagagatcaagatcatcctggctaacatggtgaaaccctgtctctgctaaaaacacaaaaattagcggagcgtggtggtgtcacctgtagtcccagctactcaggaggctgaggcaggagaatcacttgaacccgggaggcagaggttgcagtgagccgagatcacaccactgtactccagcttggcgacagagcaagactccgtcttggaaaaaaaaaaaaaaaaagaaacctgaaactagttataagttagagtttcatatccctgtttatataacaagttgtataattaacactgatctcagcattaaaaaattttcctctgaaaaaagtttggaattctgctgtggttgaaattgcaagttctgtgaaggtagtggtgatctcataacacatatgcttagtatttattgtgaaattagcacttttattcaacaaatatgcaccaacaaggcagtcactaggtataaaatgaataaaatagtgcctgtattcaagtagtttatctgctagttaggttgcagagtcagtcacaaaatagcatggcacaccatagagggcatagggccacaggaacaagaggaaggtcacctaattctgtcttggaagtcaaggaagaagtaacattgaattttaaatctataagctgagtaggaattagatagatgaaaaataagggcagagacatgatcagatttgtattttacaaagactaatcttacatggagagaccaattaagtgaatatggcagtcctccagataagagatggcagtactgagagagaatggaaaccatgtggttccttttatgattatgatgattattattattttagagacagagtctaactcttgtcacccaggctggagtgcagtgacatgaacatggctcactgcagccttgaactcctagactcaagccatcttcccacccagtagggctacggatgtacactaccatgcccagctgatttttttttaatttttgttttaattttttgtagagacaaaggggtcttgctatgttcccaggctggtgtctaactcctggccttaagtgatcctcccaacgtggcctcccaaagtgctggtattacaggtgtgagccactgcaactgacctatgtggttcttttgataggagagactaattgttggtgctatctagcacacactgtgtgtagacatcttgttaaatagaaaatagatttatgggtatgactatgaagagtctaattccccaaaccacacacacaactctatctacgtttgaccaggctatttaaacttaactgcagagtgtcagcatgttaaacattgatttacataaaatgatagctgcccactttcttgtaaatgttataaaaactgtagagattaactaaaaaatgcacacagaagtttgctttcagttccacaagggtagtttatttttgttataaaaacagtattccccactttcttagataccagatctctgcccagattttacccagtttcatcttgctgctctctaatctcctatgtatgtaatatactttgaccatttaaatatgtattaagacacttgagtttttagtgccctttggtttattttctccggtcccaattatctctaatcttcattttttcattttacctattttatatttcgaaataggttttgaatgaagctcaaaggacaaacccaaataaaattctgtcgtatctctaatatattgtggttgcttacccagtaacatttttaggtgcttttctgaatacatataaagtttaagatctttggagttttaagtatataatgtttttctgggcaatttctccctatccaaactatgagggccttctttcatcaaaagaaaaaagatatatcaactacaaagtaatgattttgatggactaggctacgaaatctgtccattttttcctccttcttacagtttaatagcaattgcagtgccctttgcccttactgtactagaagacgaccccaggcagtgactgacatctgatttttctattaattataccatcactgccatttccagttgaatcttttgttggacatcagaaatttttcttacatgaataaaatttaagcatacggttgggcgcggtggctcatgcctgtaatcccagcactttgggaggcctaggcaggtggatcacgaggtcaggagatcgagactatcctggctaacacggtgaaaccccgtctctactaaaaatacaaaaaattagccaggcgtggtggcgggcgcctgtagtcccagctactcgggaggctgaggcaggagaatggcatcagcccaggagttggagcttgcagtgagccaagatcgcgccactgcactccagcctgggcgacagagcgagactccgtctcaaaaaaaaaaaaaaaaaaaaaaaaaaaaaaaaaaaaaaaatttaagcatacaatttaggctgcagtttctcaaaatattgtattaaaaataaccaattatatgcttttatagtcagtataacgtatccagttagtgtagaaattggcatttgttgaaaactactacatgttagtctttgatatacattcttctactttttggaccctgattattaaaaacacctttgaatagggccatgatttactttatatccatttttatactacatagtggaagaaaattctgatttgttatttcctactatgatatgtaccgtgtggcacatatcatataaatgatccaattctacttgtagatgaattgaaagaaaggcttaaaaaagttcttagggtttgtgtgtgtggtttcactgtaaaactatcatttttgtattgaactaacctcagtatacataaaatctttatttggcctggtatgtacgtatgccaggaatctttggcagaccctaacacttacaatacagatgagccatgtgtttcacactttttttttaacaaccttcagaaatattctcttgttcatcagagtgcttcccctaagccaagcagtttcgatgatagccccagaataactttgcccaagtctctccataaatgtaacttaggactccaagtggtgtatttttatactcttgccccataccaagtaaatctcaagatttattttaagggagtggccttcactgcttaaagggcctagcatttaagaacagataagatttttaatggtgatcctaaatgtttttttttaaaaaacttgcttgtttttctcttgaaactaaatgtttttattcacttcattttaagatatattgtaatcaatccaaagtatggctttatttttagtataaacagtcaaatgaagcttagtcttgtggcattgtcagatttataaccaaatattactgaaactaatttttttaagttcaaaaacccaatctagtagtttctctcttattttcaacttttattttagattctaggggtacatgtacaggtttgttactaagatacattgtgtgatgccggtgtttggagtatgattgaacctttcatctaggaagtaagcacagtacctaacaggtgctttttaacctgtgcctcccttcctctatcccccctcttgtatttcccagtgtctgttcccatctttatgtctatgtgtactcaatgtttagctcccatttataaatgagaacatggtatttgtttttctgcattagttcatgtaggatactggccgcctgctacatccatgttgctgcaaaggacgtgatttcattctttttgtggccacatagtattccatggcatataaataccacattttctttatccagtccactgttgatgggcacctgggttggttccatgtctttgctattgcaaaccatgctgcagtgaacatatgggtacatgtgtctttttgatagaatgatttatttttctttgggtatattcccagcaataggattgctaggttgaatggtagttaaactcttaattctttgaagaatctccaaacttctttccacagtggtgtcattgtggttttgacttgcatttctctgatgattaacaatcagcatttttccatatgtttgttggccacacgtatgtctttttttgagaagtgtctgttcatgtcctttgcccatttttaatggggttgtttttgcttgttaatttaagttccatataaactctggatattagggctttgtcagatgcatagtttgcaaatattttctcccattctgtagattgtgatagtttctcttgatttgcagaaactctttagttaggtcccattgtcaatttttgtttttgttgcagtttcttttggggattagtcataaattctttcccaaggccaatgtcgagaaggttatttcctaggttttcttctaggattttcatagtttgaggtcttacatttacatctttaatccaccttactaatttttatatggcagtaggtaggggtccagtttcattcttctgcacatggatagccagttatcccagcaccattaatggaatagggagtcttttccctatggcttatttttatcaactttgtgtagattacatggctgtaggtgtgtgtctttatttctggactctattctgtaccattgtgtgtggtttttttttaccagtaccatgctgtttcggttactatagcctgtagtatagtttgatttggggtaatgtgatgttgccaactttgttctttttgcttaggattgctttggctatttggggcattttttggttccataggaattttagaatgctttttgctaattctgtgaaaaatgacattgtagtttgataggaatagtgttgaatctataaattgctttgggtagtatgaccattttaactatactgattctaccagtccatgagcatggaatgttattccatttgtttgtgtcatctttgatttctttcagcagtgttttgtagttctccttgtaaaaattttaaactaacttagatgcattcctaggtattttactctttttgtgactgttacaaatgggattgcattcttgatttggctctcagcttgaacattactggtgtatagaaatgctactgatttttgtacattgattttaaatcctgaacctttaccaaagttgtttatcagctccaggagccttttgacagagtcttcagggttttctaggtatagaatcataagtgaaaagagatcgtttgattatttattttcctatttggaagccttttatctctttctcttacctgattgttctgactaggatttccagtactatgttaaattggaatggtgacattgggcatccttgtcttattgcattaaggggaatgcttccagcttttgcccatttggtatgatgttggctgttggtttgtcatacagggctctttattactttgaggtatgttccttcaatacctagtttggtgaaggtttttatcatgaagagatgctggattttatcgcaactttttctgcatctattgagatgatcattattttttttgttatgtggtgaatcacatttattgatttgcatatgttgaacgagccttgcatcccagaaataaagcctacttgattgtggtgaattaactttttgatgtgcagctggattcagtttgctagtgttttgttgaagatttttgtatctgtgttcatcagggatattggcctgtagttttgttgttgttgttgtttctctaccaggttttggtattagaatgatgtttcccttgtagaataagttagggatgaggccctctttctagattgcttttttagaatagttttagtaggattagtaccagctcttctttgtacatctggtagaatttggctgtgaatccatctggtcaagggctttttttaattggtaggttttttattattgattcaatttcagaactcgttattggtctgttcagaatttcagtttcttcctggttcaatctaggcaggttgtgtgtttccatttccacatacatacttactccaaataatggctttatatatacgggggtcagctgaaaacaaaaatgatactttcatagtaaactccacccgcccccccacccacatacacacacacataaaccctagattttttaaagcctttgttccaatttatccatttcctctagattgtctactttgtgtgcatagaggtgcttgtaatagtgtgaagatctttttcacttctgtggaatctcttgtaatgtcatcttttacattttttattgtgcttatttgggtcttcactctttttttctttgttaatcttgctagtggtctatcaatcttgtttatcctttcaagtaaccaacttttataaactaggttttaagctaattaagatttctctactttcattaagaaggaagtagtgttaccacagactcatgaacacttctgtggagctcctgtattgactgctaatcaactatatgctccaatgggtcaggaatttatataaagttgtattaactaagttgctttaaaatagtgattgcttaactaaatgattcagttcagttaactccttcctgaagatattttgaaaaattaattagtattatttcttgctctagtcagtacagcacagttgggttcaattgtactttctgagctgtattgaaaaacatcagttttctcatttagaactatatataagtagtgagaaattaattacaaactgagtcatagaaaatgtttttttttaatcctccagcttgttactctttcttccttgttctaatgtggagtaaagaaatatgcattccaaaccatttaaagttatgactaattgaggctgtcaaagtactgtttcagtgtattgatttggcacatgtgtgttctcttttacattgtcaacaaaagtacattttatgattttggatcaagatttcactgagatacttctggttgtttaaagagtttctttatgtattggtgtctttcctttttaaaattttatcactcctctattaagttgtgatatccaaatttaaaatattctaaaaacatgttctcctgcaagttgaggtaatgatagttgttatgtggtacttactataatatatgccaggaactgttctaagcattttacatatttaattctcacaacaaccctatgaggtagggactaatattgtcctcattttacagaaggggaaatgaagagtcagggagtaacttgcacagatatccagctacaacatggcagaaccaggacttaaatccaaatatgctgatttcaggtttctgccctttagtcctatatcatactgtgcctccaagagagcatggtaaactaattagcatggttctatcatgattctgtttctattttgaactattaataaaaatttttgcaattctcagttaccccatttagtatagaacacaataagaatggaaccattctattctaacattgtacattgagatatcgttcccaccaccatatctgtcctccatagactatatggtgtgtcattttaaggacagaggatctaaaaatgatttttaaaggtgatttacatttactcttccctttgcaaaatggtttgcatccctaataatttagacaagtacatttcttcgtgatataaattacatttcttgcctttccctggaattctgagtactttccctctgagagaacaatgtaattcttatttatttagtcactaaaataacttcaggagtatgaataagtctactaaaaagtctacaggatccatgttgtagtttgagtagatggttccataccaagtcaaggtaaaagataatttatatataatatgaaaatggctgctttaggtttatagagtaatcaatataaatcttccttataaaagggaaatttcccacttataatttatgtaatgtaaagtttttcatttcatcttcccaaatgtttttagtcccacgcagtatttatgttagtacctatgtaaaggtgaaaagtgaattttttctactggtagaactaatactatttttagcatgtaatctgctgtcatcttcctatctttataagtggctttgaacaagtgtaaatagtgtaattctcttcattatatatactaccatgatttagattaatcttaaaccacagtttgtaatccgttactccaagcttagatttttttttcagtttatagtaagagtaatttgccttatataaccaatgaaattgttgcatttagagtgaaagtgagataaaaaaataatttatagaagaatttacaaaagttatttactcagattgttttaacataccgttataatactttgtataaggaataactctaatgaagtttctggcctatttgtaggcaaaattaattgggaataggttcctctggatcttttgctttcagaaaaaaaaaagttttttctccttttccatgtcactttatcataattgctaaataaaatatttctcccatcttaatagttttagaaagtaaaaatacttcttgaataaactgtgtagcgcagaccttcccattacagttcatttctatgtatttgtttaaatacccacagctcgaaaaacaaagaaaaaaataaaaggaattcagcaggccactacaggagtctcacaagaaacctctgaaaatcctggtaacaaaacaatagttcctgcaacgttaccacaactcacccctaccctggtgtcactgttggaggttattgaacctgaagtgttatatgcaggatatgatagctctgttccagactcaacttggaggatcatgactacgctcaacatgttaggagggcggcaagtgattgcagcagtgaaatgggcaaaggcaataccaggtaagatgcaaaacataaaagagcaactatataaacctttgtgttttcttcagcaaaaacactttggcttttatatcatcgtgagcccatggcttatcttgtttctcttagttctggggactatgaaggggagagtcaggtgaatacaggtgatagggagtttataataaaacatttacattactccctgcttttcaaatcattatgcacaggatggtaatttcacataggatgatgtaatatcagaattcaagttacaagactcactcaaaactccttttacactgaagtttggggaaagaaaatgtttttagttaattccatttgttttccttcattgtgccacttttaaaaatcaggttgtttgtaagattggtaaacatcaagtatgttgattgtcaaaatttgtactaaagtagaatgattttaacccttcactaaatgaaatgctacacattgaatgtaattttaaagataattttaaataaaagttaccctattggaatttggtgtggaatggcagaggtcaatgttagtgtcagctctgactttaaagacagggaattgacaagcctgtgttcacgcaaatagttagggagagagcaagaaagtaacctgacctcctgtcatccttgttttattaagggggaaagaggtgtgaatagcagggcaaatgttttgcttaactcattgattaatacctcaagccaagattcttttctgttttttaaaatcaatacataatagttgtacatatttactgtacatatttatatttagggggtacatgtaataatttaataaaagcatacaacgtgtaaggatcaaatcagagtaactgggatatccatcacctcaaacatttgtttggggaacattccaaatcttctcttttagctattttgaaatataaagtaaattattgttaactatagtcatcctgttgtgctactgaacactaaaacttatttcttctaactgtatttttgcacccgtcaaccattcccgcttcatccccatcaccactatctttcccggtcactggtaaccgccaagccaagaattttggctattttactatttagttcatgtttacttaagcagacagaggtgacaaaactggctttttttttttttttttacattaaaagctattaaaaagcacctagggggctgggtgcgatggctcacgcctgtaatcccagcactttgggaagcccaggtgggtggatcagttgaggtcaggagttcgagaccagcctggccagcatagcaaaaccccatctctactaaaattacaaaaattagccgggcatggtggtatgaatctgtattcctagctacttgggaggctggcactgagaatcacttgaacccgggaggcggaggttgcagtgagccgagatggcaccattgcactccagcctgggtgacagagcaagactttgtctcaattaaaaaaaaaaaaaaaaaaaaaaacacaagagggtttgtgagtcttaaagtgtcagatgacagaagaaaactgtgtctacctagtatttaatttccattttctgttaggggtgcccttgttttgacagggctaattgatctcattgctccttggcaattcccacagagatgatcttctgaagagtgttgcctcatacctttatttctcttaattcaggtttcaggaacttacacctggatgaccaaatgaccctactgcagtactcctggatgtttcttatggcatttgctctggggtggagatcatatagacaatcaagtgcaaacctgctgtgttttgctcctgatctgattattaatgagtaagttgtatgtgtgtcattttccctgtattcatagggtatctttaaccagctgatgttttcctgattgactgctattgtgataattcaggactgaaacaatcctactaggtatctaggatctaggcaaactggaaatagagttatgagtgcttggggcaggacaagtgtaatgtaaagcaaatgtacatgtggcattattactgtcccaggacatgtttgaggatatttaacagcatatctgaggttagtaaagtctgtcgcaagcaacaaggaatcttactgtgatatcatttacataaccctattccagaaagaaaaaggagcatggtaaaactcatgtggattcagtggggacaattgtagatgaggatatctaggctgatggggtgggacatatggacccagacacaagaggtatctctttgcatggcaaggctcacccagtgtctgtggtttaagaatatgggaacaaatttgttttgtttaactgagagaagaccaagcctttaagattttataaatcagctattctcttatcctctaagcttattcctgtgtctgcgaaatacttcaggtgtccatttccccttacctcattgcagttgtttcctcactcgttttctccctccagtgtaacgttcatcatgttggctaatgtttgcttcctcaagcacagtctgactgcatcacatatctccccagtacacagattgtcttcagtatcttcccactgaccctccagtacatattctgcatgatttcagactttccagaatctgacctcacttcctctcccattgttttccttcacacactcttcattcccatccatcctttccagcatactcttagactcttggtgttcacatcaccagatacacagcagagaagtcacatcctagttactctcactttctaccttgtattactacttttcgtacccctagcttattgctattagtacaatgtaaacagggagttcacacacacatacccctggtctaagaagaataaaaaatgaaggagatttctgtttgtatagaaaacagaagtcaccttgacttttattgccaaaaagaggactgttcaaactactgcatcacaatgtaacaagattaggtagttggatccaattttaaattaactggtaaatatatttagtttctggggaaactgaagacattattactcatcataatcctaccatgctgtttaaaaaataccatgttggcagtatttgttttttagtcactttctaatatgtaatttgaaggcatttaagtggaattaaaagcataaacagatttgtatgaaacaccaacttatcctggtttataaaactaacctaatttagggtttttattattagggcattcagatttagctttaagcagtcacagcaaaatctaatcatgccacatacattccttacataaagtgggatttataattttttttcctcaacagatttacattagtttcattttcattaagggatatgtacttcctattcttgtgttctcatgctgctgcctaaaagatgggcagtcctccacctttttcttttctttttttttttttttttttttgagacgagtcttactctgtcacccaggctcaagtgcagtggtgtgatcttggctcatggcaacctctgcctccagggttcaagtgattctctgcctcagcctcccgaatagctgggattacaggcgcactccaccacacttggctaattttttgtatttttagtagagacggggttttgccatattggccaggctggtcttgaactcctgacctcaagtgatccacccactttggcctcccaaagtgctgggattacaggtgtgagccaccgcacccagccctccacccttttttcttagcccactatgtttccatactgctctggtgtctgtgacaggcagatattgcatatcagaaagtatgcattcaagttctgaccctctatagagctgtcaaacagtctctcatggttgcccttaggtcagaacgttgtgggggaaaaaaaaattgttgttgtttttacagccaacaagaatgagtttttacttattctactacactataactttgttgaaattttcagttatatgagtataaccatgtacaagaaactaaaggaaaaaaaggtgcctcccagaaaaggagtgctttacctactattaaggactagggaggtgcctcttcggtaagagcagattttaaatttgaagagcctctgatcactttggcagcatataagtcatgtctaatttattttatataaaggaataaaccacatattcagtagagaaaaataataacctttctgttgttaagtccaagacgactttctgtcagaaacttaaaaaaaaaaaaaaatcttgaagcattttaaaagctgtgaactgggcccagtttcaggctcttagtgtcatttcacaagtcaggaaactttagagacctatttgaaaatcataggtatgtaatgacttcagaatcataagcaagaattggtttagtacctttagtttaaagaatattaaggcatatgcctgtcagaggcagattttgagcatcagaagtctagaatcaagttctaggtctcgccctctgcataactgtgaacagtgtcacacatttttgtctttaggatggactgctgtgaaaaaatttacctttaaaaatcaagtgtgtaggacctaaaactgtcgtctaattgaccgtattcaaatgataaaccttgatttaaatgagcaactagtaataagttctataagaattctaacactttaattaaataataaaataatacatggcatgcatgatagaaaataatatctccactgttacattagattattcattagtctatttaaacagccaagatgcaggaagtttaaggaaagttctccaaaattctgattttatagggaattagcaataatattattgcagtagttgtttttctttatgagttcatagttttgcaaaacaaaacaaaaatgtgctttttggggggaagtagcagtatttctaactaataccctgctatttatctttcacaggcagagaatgactctaccctgcatgtacgaccaatgtaaacacatgctgtatgtttcctctgagttacacaggcttcaggtatcttatgaagagtatctctgtatgaaaaccttactgcttctctcttcaggttggtagaacaccttttcaccttatgtcaaaagcatgaaatatgaaggcctagaaacaaaggttaatttatatacatagtactaataattataccaagtctactattatttcctactagtcagatgatttttatgaatgtaaaatattagaaaggcacagtaagtgacaccaagattaataagacaaataggtatggcagaaacagagaggtatatgagctgcatagggatctctgttgataagaatctgtgtagacttttttctccttccttcctttgatctttgatcatgggaagacatggaaaaagaaagctaactacagtgattttgtccactacactgttatttggttaaaaattttagtttcctaatgagtattagcatgtatgagaaattatgggagaaaaaggcgcatcctagaaaaggtgtgcttaattactattggggattggttaacatagcatgggagctggattgtcagagattcattatctagaaaatggcaacaagagtttataaaacgaacttctgtgagattactttttagctagcaaagacaaagatgtccttcagtaggtgaagtgataaactatgatacatccagatgatggaatactattgaggactaaaaagaaataagctgtcaagccatgaaaacacatggagggacgttaaatgcatattactaagtgaaaaaagctaatctgaaagggctacatactgtgtgattctaactatataacattccataaaaggcaaaactgtgaagacagcaaaaaaaaatcagcggttgccagggtttagaaggaagggagggataaatgtgcagagcacagaggatttttagggcagtgaaaatacttcgtatgatactacaatggtggaaacatgtcattatacatttatccaaacccaaagaatgtccaccaccaagagtgaaccctcaactatggactttgggtgatgatgtgtgggacaggaggtatatgaaaaatctctgtaccttcctcccaattttgctgtgaacttaaaactgctctaaaaaaagtcttttttaaaaaaagctctatgaactagttggtattataaaccttaggccatttcaagtaaaaattacatatcaatgtttattaaatactgagttaatagctgaatacctctttcatatacaaataagtacatttgcaattttttaaaaagtcttaattccattagtaactgtggtttcatagttgccaaataactgtaagctatggatgttgcacaagactgtgattttatttaatcatttcatatctatttaaacatttccaaagcgcacattcatcttaatgttttcacactatttttgctcaacaaaaagttattttatgttaatggatataagaagtattaataatatttcagtcaaggcaagagaacccgataaagatcattgctagagacgtttaatgttacctgtagcggtacacttgttaaagaagtgattaagcagttacataaaattctgatcatagctttgattgataccatgaaggtataattcagtgcctggatactaacaactttacttgtttaaaaaaaaaaaaaaaagaatggtttcaattgtatacatcccagactaattgagctatatgatttttttcattgtaaataatatcacgagttcttcttgttaaaaaataatagaatcataaggatggaaatatataccttaagatatagacttctactatgatagactactggaataggtatataacctcccaccaaaaatgctagactaaaaaaattaagaactaagtgaaggcaggaacctacagagataagtggaactcaagccaacttgctctttgacggcatttgtagaacctggtaaattagtaagtttagtaagttggggtttttttaagtttataatcttttttaaaatgatttcaataggtttttggggaacaggtagtggtaggttacatgaataagttctttagtggtgatttctgggattttggtgcacccatcacccgagcagtgtacactgtacccaatgtgtagtctttcatccctcatcccctccccaaccctagtccacaaagtccataatatcattctcatgcctttgcatcttcatagtttagctcccacttagaagtgagaacatgcaatatttggtttcccattcctgggttacttcacttacaataatggtttccagttccatccaggttgctgcaaatgccattattttgttcctttttgtggctgagtagtattccatggtatatatataccacattttctttatccactcgttgattgatgggcatttggactggttctgtatatttagtaagtttaaaaacaagggatggaaatataaatgcagttgaaaaggcagtggatggatctaaaagcagaagaatacaattgtttttaatgattgtgtatatgtttgtgtatataaaccacaagggaaatctgtaggtactgaaaatcacaacaggaaaatggcaacaaagctatagaaactggaaaagcaatgacttttcttagatccctcagagaatggaggtcataggacaaaccaccacttcaaaatctagaagaatagacaaatacagagaaacagccaagatcagcttactgggaaaagatgccactgaagccaggaagactatggcaatttgggaaaagatgccactgaagccaggaagactatggcaattttgatgaattgctggaggctgagtgaggactagcttcagagttaaaaactcccagggacccagtcttagtgggggtttcctgcaatttcttgggtttaccccacaaaatttctaacttccagaaactccacaaggttcttatggtgaagatgcaagaaaaattccctcctttttctggtaggagtagagggaaggtaaaatttggaaatacgtagcagagtgttcacaacaaaaggcctgccctgtaaggaaaactaattcaacaggcccttatgtgacctgggggaaaggcaaatagaggattctagcccttccttagccttcttgtctcatttctgaaagtcacagcccagggattcagacccactaaaaaaaactgagatttaatcataaagattaaaaaacaattcccctccccctccccaacaccttaccaccatataaacagggctccaggataaaataacagtggattacaactgagagagctgcaagacacaagctgtttaaggagctcttaggaaacccaaaaacaacagaagaaaaagtaaataaaaacaaggaaactagaggaaactgaagcctccagtacctacaattatggcaaacattaaatacagcccagctcctagccagattagcatgaaacctcacactaaaagtctaattacttcagttttgatatatcaatcatgtccagctttcagcaaaaaaactacaaggcatgctaaaaggcaagaaaaacccacggtctgaagagacaaaacaagcatcagaagcagtcctcagatatgacacaaatatttcaattatcagatagggaatttacaatacctatgattagtaggttaaaggctccaatggaaaaaagtagacaacatgcaagaagtgatgtacgcagagagatggaaactctaaaaataaatgctaaggaatgctgtaaggaaatgcagaatgatgttgatgggctcatcagtagactgagcacagccaagcaaagagtcagtgagcttgaagatagataggtcaaaggaaattcccccaaactcaaatgcaatataaacatagtagacattaatccagctgtatcagtaattactttaaatttgaatgctctaagtacaccaatcagctatttttttaactaggaggtgaaaataaagtttgccaccagatgctcactaaaaaattattagaggatatatcccagccaggcgtggtggctcacaccggtaatcccaacactttgggaggctgaggcaggcagatcacagagtcaagagatcaagaccatcctggcttacgtggtaaaaccccatctctactagaaatacaaaacttagctgggggtggtggtgcgcgcctgtagtcccagctactcaggaggctgaggcaggagaatcacttgaacctgggacgtagaggttgcagagagccaagatagcaccactgcactccagcctagtgacagagggagactccatcttagaaaaaaaataataaaagtaatcccatctttaagaaggactgaagaataacaaaagtggtaaataatatagatacatttaaactgacatttactatgtatataaaataacaacagtaacaatttccttgagggctaaaaagtagaactaaagtaagtttcaaggatgacaactagaaatagggtatgcagggtatgcaaagtaccaaaccattgggggaagagaatacctaagaaaaacaatccaaaagaatgaaagacatgagaggagggagaaaaaaatgcataaacaagggcatgataacaggaagtaacagataaggtacattagtacagctaaattcaaacacatcagtagtttagtttcattaaatatagagatggggccaggtgtagtggctcacacctataatcccagcactttgggaggctgtgggcagatcacttgaggtcaggagttcgagaccagcctgaccaacatggcgaaaccccgactctactaaaactataaaaagccgggtgtggtggtgcatgcctgttatcctagctactcgggaggctgaggcacaagaatcatttgaacctgggagatggaggttgcagtgagccaagatcgtgccactcttctccaaactgggtgacagagggacactgtctcaaaaataaaataaatgtagagatggactgaatgctccaagctaatctgacaggattttagaaataatccaaatttatgctatttaaaaaaagctatatctgaataaagatattgaaaggctgaagtaaaaggatctactttgcatagtataacccaagacatggccaactttttctgtaaagggccagatggtaaatgttgttagctttgcacagtctctgtcacagctactaaactctgcccttgtggcaggaacatagtcattgacggtactcaaatagaacaggcatggctgtgttccaataaaactttatttacaaatacaggctgcaagtaggatttggcccataggccaaagtttgctggcccctatattgaccaaaacaaaaccgaaggagctacattattaccaagcaaaatagatgttaaggcaaaatactccttaaagcatttgttcaggaaaaataattgtaaatatatagtttcaaattacataatacaaaaattcatagaacaagaatacttagataaatctagtaaaaataatgagattttactatacctttcttacaaattaagcagacaaaaaaataaggatatggatgtacatttcatctctcttgggtcaatactgaggtgtgagatcactgggacataggttgagtgtgtgtttaaatttatttttaaaattgccaaacttttccgcaattgttaacatttaccagaaatgtatgagacttcttaagatccattctatatcctcctcagtacttggtactgtcagcctctttcatcgtaggtatactgatgattaaaaatattaagcatcttttcatgggcttattggccacctatatttcttatttggtattgtgcctcttttaatcttttgcccattttttaactgggttttaagaattgttcaaatattctcaatgtggccctttgttaaatatatgttttgcatgttttctttaagtggattacatttacagttttcttaaaaaaatgtagagatgagcaaaagtgtataattttgaagaaagcttcgtgtctttgtttactaagaaagttttgcttaatccagggttaaaaagattttctactatttgttttcttatagaaattctgtagtttcagctcacatgcttaagtatatgatgcaaggtaagggacaaggttcattttcttccccaaaatccatatctggttgctccagaacttgactctcttttccctattgagttacttggcaattttgtagaaaatcagttgtttgtatatgtgtgggtctactttcagactctttttcttacccaacgatctgtatttcttacccaatgatctgtatgcctatattcatattgataacaccctgtcttgattactgttgcattacagtaaatcttgaaatttggtaatatgaattctccaaatctgttgttcttttccaaactgttgttttggatattctagtttccttgcatttccacttccttttttttttttttttttgagatggagtctcactattgttgcccaggctggagtgcagtggcatgatcttggctcatcgcagcctcagcctccccagcagtgggattgcaggcacccaccatcatgcttggctaatttttgtatttttagtagagacggggtttcgccatgttggccaggctggtctcaaaccctgacctcaggtgatccacccacctcggcctcccaaagtgctgggattacaggcatgagccactgtgcctggtcttccacgtattttttaattagcttgacaatctctaccaaaaagtcttttggggctgggtgtggtagttcatgcctgtaattccaccactttgagaggccaaggcaggcagatcgcttaagcccaggagtttgagaccagcctgggcaaaatgtcgaaaccctgtcactacacaaaatagaaaaaattagccaggcatggtagcttgtgcctgtagtcccagctacccaggaggctgaggagggaggtcaaggctgcagtgagccatgatcatgccagtgcactctagcctgggcaacagagtgagactctgtctcaaaaacacagtctgatagaatttttattaggatagccttgaatctatagatccatttgaaaataattaacatcttaaatttccaatttctggccgggcgctatggctcacgcctgtaattccagcacgttgggaggccgaggtgggcagatcatcaagtcaggagttcgagaccagcctgaccaacatggtgaaaccctgtctctactaaaaatacaaaaaaattagccaggcgtggtggcacatgcctgtagtcccagctactcaggaggctgaggcaggagaatcgcttgaatctgggaggcagaggttgcagtaagccgagattgtgccactgtactccagcctgggcaacagagtgaggctccgtctccaaaaaaaaaaaaaaaaattccagttgttgagaaagaataggaattccagctttggaggagtggggagaccatcaaatcctctttccaaaaatactactaaaatactactgagcagagtatagttccacaaatagtcttctgtaaagagactcacagtacatatttgtctttgtaggccatatagtccctgttgcaatttctcaattctacagctataacaggaaagcagctatatacagtatgtgaatgcttgtgttctaatacaaatttatttgcaaaatcaggaaaatggcttgaaatggtttaagatctagttttctgactagatcatggtatataatcttttccatatatattttgaatttggtttgctaatattttgctgatcatttttatatctctctttatgaaggatgctgatctacaactttcttttcttgtgatatctttttctggctttgctaccagggtagtactagcctcttaaaatgagttgagaagtattttctgttttcttaaagagtttatagagtattgatcttatttattctttaaatatttgatacatgttaccagtgaagccatctgggtctgtgttttctttcagggaagatttttaattatttgcttatttgttatatagatctattcagaatttatatttttccttgacatagttttgtaatttgtgtgtttctatgaaatgagccattttgtctgagttgtctaacttgggcataaagttgtttgtaatcctttaagttttgtaggatccatagaggtgtcccctccattatagattttcataatttgtgcctgatcatctttttttcatggtcagtctagttaaaaatttatcaattttgttggtctttacaaagaaccaatttttagtttcattgaaatttttagtttcattgattttctctttttgtttcctatgtcattgattattatttcttcttttctgcttgcttttcatttaatttgttcctctttttctagtttaaggtagaagcttccattgttagttgaagaccttattttcttatatagatgtttaaagctatacattttttgtatattttcattcatttcattttctaatgtccttcatgatttttttcattgacccatgtgtattgcttaatttttatatatttggggattttccatatctcttcctattcatttctaatttaattccactgaggtaggaggtacattgaaggactctaatattgaatgactccaataagtcttctgagacttttttaggcacttgcatatggtctatcctgagtgttccatgagtgcttgaaaaaaaacttactgtgctcttgttaagtagagttttatgaacgtcagttaggtcaagttgattgatagactaattcaagttttctgtatctttgctgattttctgtctagttgttctagatcctacaactttgtctacatccttgccagagcttggtatggtttttttattatcgctatcctagagagtatgtagttgacccttgtgacttgccatgcatttaatgactgcccatgttcatagcagcattattcataatagcaaaaaaaacttttatcatatgcttttgtgcctcaagatcatatatttttcgtttttagtcactaatatggtataatggtataatatactgtttaatttctgagtaattgactagcctttcattccggggataaatcctatttggttatgatatagtatcctttttacatatagctgaattcattgtactaaaattttggtatttttgcatctaaatccatgagggatatattctatagctttggtgttatgataatatggtattatttctttcttaaacgtttggtaaaactcagcagtgaagctgtcttggtttgtttggagccttttttgtagaaaggttttcaagtacaagttcatcaaatgtttactgataatatgtttattcttgagtgagctttgttggtttacatctttgaaggaatttaactgtttccttcaaatgttgaatttattggtataaagttaagttattcataatattcccataatatccttctaatggctccagtatctctagtgttattccctttcattcccgacattggtatttaatatattcttgctttttttttttttttttaatcagtctggctaaaagtttttcagttttaccaatgttttcatagaaccagcttggtcttgattttgttgttgtttatgcatgttcttagttattcgtttctactctttatcctttccatttttcttgtgtttagggtagaagcatatataattaattgagacctttcttttctaatcaaagcttttaatgctgtaaattttctaagcactgtcttcattgcatcccacacattttgatatgctgtgttttcagtactagagatttttaattttatgataccttatttaatcatgatgccttatttaatctatagcttattaaatgtcaaattctaaacatttgggtttttctccagatatgtttgttactgacttctattttaatctcatttttgtcagacagcattcattgtatgacttaatcctcctaaatgtattcagacttgttttatgttctagattaatgttctgtgtatacttgaaaagaatgcaagttcttgggtagactgtttcagaaatgtcagtcaaatttaagtcttgtttattcttattgattctgagacaaaggtgtttataatgttagatttgtctgctatatctctgacattgccaaatatccccttggaggcaaaatctccccctcccttttgagaaccactgatctatgtagccttttttctgggactaatttagccttgcttctgagatgtggcccctaggtctctactgaatgcccggcatatttaattagatctttctttcctctatggcctcaagggatttcaccctaagtatgcacaaatttttattcagccgaagactgtacagatttctggaggcctttctttgtgtacctccttcgtttccagtagtctgacccataaattgtacagatttctggaggcctttctttgtgtacctccttcgtttccagtagtctgacccataaattgtacagatttctggaggcctttctttgtgtacctccttcgtttccagtagtctgacccataaattaaagctgctttagcctccccaaacttcaatctctttctcctcaacccagcaagattgctagaccctgggttccctttcccttcactgcagtatgataattactttcaagcacaaaggtttagaattaagatttcttactcctgggctaggtatggcttaccgtatttgtttctcttttcctagggatcataatcatgtattgcttgttgtccagttttccagtaggaggggaattccaggctgtacttacttcctgcagccaaaagaggaagtaatgttagtgatttcaatattaaaacattaaaaaaaaatttaagatggatgaaattcttttatatgcatattgaattgggcttcaccatagttatttttagaattaggactaaccggcagggaaaaaaactatacggcagggaaaaaaactataagccatcgctgttttacaattttgcaataattagattttctgtagtatagtaatgtgtaaaattaacccattgttaatatagaatgccgttatcactcctgattaagcggtcttcattttcatgttaatactgatgtcttgtaatgctttatggaatcaaacattttcatacatattcattagtctaattctaatcataatccaatgaaaaagagcaggaaagatgctcaaggaggttatattcaagtccacatggcaagtaagaaataagactactcggctgggcatggtgacttactgcctgaaatcccagcactttgggaggccaaggtgagcggaattgcttgaacctgggaggcggaagtggcagtgagctgagatcatgccaatgcactccagcctaggcaacacagcaagactctgtctcgggaaaaaaataataataataagacttctagaagctcctaaatccatagcttttcctctataccagcatcttctaaaaatgtcagcagcagtgaagtttcagtttgggaaataatgcatttcccctctctggagagtgcacagttatatctccaagaagtactgaaattcagaagtctgcctaatatgtattaaacatttagcttttctcaaactttgaccaccaaatcctttgtctcgctctaactatagttaacacagaatcagtgttcccaggagcacactgtgaaaaatgtagcactctacaaaagtcctaatctccacaggattaagtgaaaccatgattaaccctctgttccttgtccttattagtaccattttctgaagagtaatgtatccccccaaaacttttatactagtttcactaaccagaatccatgtacataaggaaggacagatatttgctccctactaagacatatctattagctacattaaaaaaagtattgcatgccgattttaaagttataattaactggtgatatcacagatattccaagatataattgctggaataaacactgttgttgaagccttctatctatctcagtactagaattaaactcaagtgcagaatggcagacaaagttaactaaaaatcactgtattatttcatttggtcctccaaatagctttgtgagctaaggaggagaaggtgtatcatcaccacttccattttatagatgagaaatcaagtgatttactcaaggttaagtcctccaattctttgttatcctgcattttctcttggctgtagtttaattaataatcctaagaaaatgcttatattttagagtgcagtaagagtacataaacaatgttaaatgcccatcttgcatgtataaaaagttatagcaagaaatctggctgggaatggtggctcacacctgtaatcctggcactttgggaggccgaggcaggaggattgcttgagcccaggagtttaagaccagcctgggcaacatagggagatcctgtctctacaaaaaaatttagccagacacagtggcttgtgtcctagctactcaggaggctgaggtgggaggatcacttgagccaaggaggtcaaggctccagtgagctatgattatgccactcagacatggtggcttgtgcctacagtcctagctactcaggaggctgaggtgggaggatcacttgagccaaggaggtcaaggctccagtgagctatgattatgccactgcactccagcctggatgacacagtgagaccctatctatctcaaaaaaaaaaaaaaaagaaaagaaaagaaaaagaaaatcctttaactgacttcatcttaaccttttagttcctaaggacggtctgaagagccaagagctatttgatgaaattagaatgacctacatcaaagagctaggaaaagccattgtcaagagggaaggaaactccagccagaactggcagcggttttatcaactgacaaaactcttggattctatgcatgaagtaagtgtcaaacataaagccaaatataagagttttctgggacaaagtatgttttgattagtgaatataattatataccagcagcgcccccacccccgcccccagtttgtggatgttggtgatagcttgagttcaacttatgaacttcagttttgtagacatttttcctaaggccaattatgaaatatcctttcacctagtcatgtgtatataaaatcaccatgttattacagaatttagtaatactgtttttaaaaagtatgattaatccattaaattagaataatgcacccttcatatattatggtactacagtgattcatgaaataattctatataattctacatacaatcaaagaaatataaaatgtgttttgtacggaagtgcttatttttcatctggggaattccagtgagattggtatattctaggccagataattttttcaaaatagaggacaacaaacatgagatgttcccactgaccaatttggaagcctgatcattaccatatcttctcttgcaggtggttgaaaatctccttaactattgcttccaaacatttttggataagaccatgagtattgaattccccgagatgttagctgaaatcatcaccaatcagataccaaaatattcaaatggaaatatcaaaaaacttctgtttcatcaaaagtgactgccttaataagaatggttgccttaaagaaagtcgaattaatagcttttattgtataaactatcagtttgtcctgtagaggttttgttgttttattttttattgttttcatctgttgttttgttttaaatacgcactacatgtggtttatagagggccaagacttggcaacagaagcagttgagtcgtcatcacttttcagtgatgggagagtagatggtgaaatttattagttaatatatcccagaaattagaaaccttaatatgtggacgtaatctccacagtcaaagaaggatggcacctaaaccaccagtgcccaaagtctgtgtgatgaactttctcttcatactttttttcacagttggctggatgaaattttctagactttctgttggtgtatcccccccctgtatagttaggatagcatttttgatttatgcatggaaacctgaaaaaaagtttacaagtgtatatcagaaaagggaagttgtgccttttatagctattactgtctggttttaacaatttcctttatatttagtgaactacgcttgctcattttttcttacataattttttattcaagttattgtacagctgtttaagatgggcagctagttcgtagctttcccaaataaactctaaacattaatcaatcatctgtgtgaaaatgggttggtgcttctaacctgatggcacttagctatcagaagaccacaaaaattgactcaaatctccagtattcttgtcaaaaaaaaaaaaaaaaaagctcatattttgtatatatctgcttcagtggagaattatataggttgtgcaaattaacagtcctaactggtatagagcacctagtccagtgacctgctgggtaaactgtggatgatggttgcaaaagactaatttaaaaaataactaccaagaggccctgtctgtacctaacgccctatttttgcaatggctatatggcaagaaagctggtaaactatttgtctttcaggaccttttgaagtagtttgtataacttcttaaaagttgtgattccagataaccagctgtaacacagctgagagacttttaatcagacaaagtaattcctctcactaaactttacccaaaaactaaatctctaatatggcaaaaatggctagacacccattttcacattcccatctgtcaccaattggttaatctttcctgatggtacaggaaagctcagctactgatttttgtgatttagaactgtatgtcagacatccatgtttgtaaaactacacatccctaatgtgtgccatagagtttaacacaagtcctgtgaatttcttcactgttgaaaattattttaaacaaaatagaagctgtagtagccctttctgtgtgcaccttaccaactttctgtaaactcaaaacttaacatatttactaagccacaagaaatttgatttctattcaaggtggccaaattatttgtgtaatagaaaactgaaaatctaatattaaaaatatggaacttctaatatatttttatatttagttatagtttcagatatatatcatattggtattcactaatctgggaagggaagggctactgcagctttacatgcaatttattaaaatgattgtaaaatagcttgtatagtgtaaaataagaatgatttttagatgagattgttttatcatgacatgttatatattttttgtaggggtcaaagaaatgctgatggataacctatatgatttatagtttgtacatgcattcatacaggcagcgatggtctcagaaaccaaacagtttgctctaggggaagagggagatggagactggtcctgtgtgcagtgaaggttgctgaggctctgacccagtgagattacagaggaagttatcctctgcctcccattctgaccacccttctcattccaacagtgagtctgtcagcgcaggtttagtttactcaatctccccttgcactaaagtatgtaaagtatgtaaacaggagacaggaaggtggtgcttacatccttaaaggcaccatctaatagcgggttactttcacatacagccctcccccagcagttgaatgacaacagaagcttcagaagtttggcaatagtttgcatagaggtaccagcaatatgtaaatagtgcagaatctcataggttgccaataatacactaattcctttctatcctacaacaagagtttatttccaaataaaatgaggacatgtttttgttttctttgaatgctttttgaatgttatttgttattttcagtattttggagaaattatttaataaaaaaacaatcatttgctttttgaatgctctctaaaagggaatgtaatattttaagatggtgtgtaacccggctggataaatttttggtgcctaagaaaactgcttgaatattcttatcaatgacagtgttaagtttcaaaaagagcttctaaaacgtagattatcattcctttatagaatgttatgtggttaaaaccagaaagcacatctcacacattaatctgattttcatcccaacaatcttggcgctcaaaaaatagaactcaatgagaaaaagaagattatgtgcacttcgttgtcaataataagtcaactgatgctcatcgacaactataggaggcttttcattaaatgggaaaagaagctgtgcccttttaggatacgtgggggaaaagaaagtcatcttaattatgtttaattgtggatttaagtgctatatggtggtgctgtttgaaagcagatttatttcctatgtatgtgttatctggccatcccaacccaaactgttgaagtttgtagtaacttcagtgagagttggttactcacaacaaatcctgaaaagtatttttagtgtttgtaggtattctgtgggatactatacaagcagaactgaggcacttaggacataacacttttggggtatatatatccaaatgcctaaaactatgggaggaaaccttggccaccccaaaaggaaaactaacatgatttgtgtctatgaagtgctggataattagcatgggatgagctctgggcatgccatgaaggaaagccacgctcccttcagaattcagaggcagggagcaattccagtttcacctaagtctcataattttagttcccttttaaaaaccctgaaaactacatcaccatggaatgaaaaatattgttatacaatacattgatctgtcaaacttccagaaccatggtagccttcagtgagatttccatcttggctggtcactccctgactgtagctgtaggtgaatgtgtttttgtgtgtgtgtgtctggttttagtgtcagaagggaaataaaagtgtaaggaggacactttaaaccctttgggtggagtttcgtaatttcccagactattttcaagcaacctggtccacccaggattagtgaccaggttttcaggaaaggatttgcttctctctagaaaatgtctgaaaggattttattttctgatgaaaggctgtatgaaaataccctcctcaaataacttgcttaactacatatagattcaagtgtgtcaatattctattttgtatattaaatgctatataatggggacaaatctatattatactgtgtatggcattattaagaagctttttcattattttttatcacagtaattttaaaatgtgtaaaaattaaaaccagtgactcctgtttaaaaataaaagttgtagttttttattcatgctgaataataatctgtagttaaaaaaaaagtgtctttttacctacgcagtgaaatgtcagactgtaaaaccttgtgtggaaatgtttaacttttattttttcatttaaatttgctgttctggtattaccaaaccacacatttgtaccgaattggcagtaaatgttagccatttacagcaatgccaaatatggagaaacatcataataaaaaaatctgctttttcatta

SEQ ID NO: 137 - DNA, 184107 bp, Homo sapiens
ctgcgcggttgactacgcttatcaatccatcgtattcctttgtcttcttgtcacaaaaagaatttcgtcagtctggaaggggagttttacttacgtaaatggatgtagaccagactcaagcatgtaagaactgtgttaatgtggatttctaagcctctgaatgaatttctaaggcacctaacctattgtttctgaaaatatttactttaaggtgagttactgtctattcaagtcagttcatagggcttctcctgagtaggaaagtggattcacgaactcacaggccttccttcttttaaggtgtggattcatggctattaccaaagaatttaaatgagcagagtttgattttaaagagaagtgttgctgtgttgttatttttaaaattaaggagcagctgaaaggcaaacttctctcatcctaacaagacataataaaggaatatttcaatttgtcttacagattttaaagtttatataatttggccaacatctacaaaacaagtggacaatatttcctcttcacttttaacaaagagtagcaaaatgtttttccttacgtagaggtgactggcacacgagcacaaatttaggcttttaagcattactgaaagaaatatctcaggggattttaatttctaaactgatgcatatgttcttttcctcaggttacaatcttaatctaaaagtggttcctgcttcataatgcctgtggacatgaagctaacaaatcttttcaaaatgtgttcatgtggtaattcactgcagcacaggagcaataatcagctatgtgcaggcatctatgctactgtctcttaaaatactttaaaagtaaggttagttattgtctattcgagtcagttagctcttacaattcatttgatagtgattatcagtacaatatattagtttgttggagtgtgagaataatggtgttaatccttagaaaaatgcaagaccaaagggaaatttaaattttgcatatttatgtttaatgtcaaatttatattcaaataaacggttatgattataactctttgtaaaagaaactccattttaagccccccagattatgatcactttcaaatacaggctcagaagtacagatttagagaaaaaggattcctcttagaggaatacatcatatatactgagacttctagcgagggaaggagtgtagttctggttcaactaagataaagtactgatgaaaggtcactggcagacaatacggagaaacagcctgccttgcaggattttttgtatgcctagtcagcctacccaaggacaatgtgtccagaatgacctctttactgcctgccagctaatcagttatcccataagaaatatgcaaacaagattcacacagcagagagcaattatttttctctccctctttcctctttgtcttaataaacgctctttttttatttgtggggtgaaatcaatctattgaggtatcgtctttgtaaacacataaacagcgtgctataattgactttgtgactttgaattattgacactgctctgtttcttttccaaagaacctttgcactgttgaaagagtaacttttccattataacctgagtcaagatgaagagaagcagggaatactgaatgaaagttacttttccatgcagcaggaaaaaacaagtttgctactatacaaatttatagaaaagtataaaattacatgtgaacttctttttctttttgtgtgtgccaaagttttttaaagatttatatctctactactcaaagcattcccatctctagcctgtattagttctgtcacctgaatcatttttcactcataaccacctggccattctttaacactcagttcatgtagattgtactaggcagtttaaatacattagattttataaacaaagacccagtgagcacagagcagttaacatgcccatggtcacatatgtattaattggcagattgcctcctcccaccttattactttacctccttccttaattacttgccattttgacagtcttctgatttctgtatagcccttatgacttttactatccaacttagtacagttacgtttcactgaatgacagggattttgtcattatggaaacatcatacagtacatctatcaaacctagctgcaatagcctactatacacctaagctaaatagtatatcatattgctcctaggctacaaacctgaacagcatgttgctgtactgaatactgtaggcacttgtaacataatggtaagcatttttgtatctaaacataagaatgatacagtaaaaatagagtattacaattgtatggtcccacacttgtatatgcagttcatctttgaccaaaatgttatgcagcaaatgaccgtacttatttatcctctactttttaactttattggttgtttcattaaggtcagttttatcccagctagataatgactgcatagcagcttctgtagcatctacgacagtatagtccagttactatctcatagaatgttttaatgaatcttgattatttaagtgaaaatttaaatttaaataaaaattttaaaaaattttaccaaaatgaatagtatgactacccttgtgtttcattttgaggtgggtggatatataatagtagctatgagttatattttacattttttgcacattagaataatatatattttgtacacagtaaagtctattctactggaaattggcaataaaccttactaagcagaaaaaactacatcagtgacttatgattctatgggaaaatatcgatagaaaatgccatgaaaatctatgaggtaatttttatttgcaaggagaaaagatatttaatggaagttcaaacataaattaatacagtcaaacaggaatgactttactaaagtataaagattggaaaatttgtgaaatatcccctattgttacatctttgaccagcagtttctttttcagaatgatatagtttctggttcattatttagtgttttctatataccatatacttttatgtgcttaaatgtgtatctcatttaatttttacaaggaccctgtgaggtgatattatgacctccccttccctatgcctcagaagaaattgaggcaatgagaaataaagtggtttatccaagatcacacagcaagtggtagagccacaatctgaacgaggtaatctgactggagagcctgtgcactcattcaccatagtattctgcaaccttacacaacccataaaatgaaaagccaccttcttagaaataagactacatgaccatcccaatttaatgttgaactttcttctttatcttcttttcctttacctgtcttagtccattcaggctgttgtaacaaaataccatagagtgggtggcttgtaaacagtaacttacttctcacagttctgaaggctgggaattccaagatcaaggcaccaacagatttggtgtctggtgagggcctacatcctgattcttagactgtagtttgttgtttttttgtgttttgttttgttttgttttgctgtgtcctcacatgcaaaaaggagtgagggatctctctggggtttcttttatagtggcactaatctcattagggctctaaccagaggtctcttttatagggcaccgattgccccccagaggaccccagctccaaatactctcacattggggattaggtttcaatatattagaggggacaaaaacactcagtctatagcctgcccccatccataaaattagtgacaattgttgaggaagtgcccaattactaaagagaaacaagaattcatgattctgtgtttcaatgccttaacagttctcagctcatcagatataacatttattttttacttttattttatttttagatggagtctcgctctgtcacagccaggctggagtgcagtggcaagatcttggctcactgcaacctccacctcctgggttcaagcagttctacctcagtctcccaagtagctgggattacaggcacctgccaccatgcccggctaatttttttttttttagtagatacagggtttcaccatattggccaggctggcctcaaactcccaacctcaggtgatctgcccgccttggcctctcaaagagctgggattacaggtgtgagccaccggacctggccagatatttctttttataacgtgctttataactcccttttcctttcttgaaattcatattgtatatcaacatgcacattttttaaagtcattataataacttagttgtaatttttttgctttttttggtagggctgccctgaagggcagacaggtttattgggcaacagctgggaaaatcagcggttggacttggccacatgctccaagaaggccacacgtccttcttcttaatggcataggagttggaggagcccttggcagcattgatgagctcctctgccaggcactcagcaatggtcttaatgttccggaaggcagcctcacgagcacctgtgcacagcagccagatggcctgattcacacggcgaagtggggacacgtccacagcctgtcgtctcacagtcccggcgcacccaatgcgtgtggagtcctcccggggaccactgttgatgatggcgttcaccaggacctgcagagggttctcgcctgtgagcaggtgtatgacctcgaaggcatgcttgacgatgcacacagtcatgagcttcttgccgttgttgcagccgtgcatcatcatggagttagtaaggcgctccacaatgggacactgagctttgtggaagcatttggcggcataccaccctgcactgtgaggtaggtacttggcatatttctccttcactgcaatgtaatcctgcagggaaatgtcactgatgtgcacatcatcagtgctccacttcccaaagagcttgatgtctggggtctctgccactgctggtgctgctgtctcccactcagtcatcgtgagaacacagcctgagtgtctctgttgctcgacgtagaccatgcgccaccctggcacagacaggaagagcaaacttacttgtaatttaaaggaaaaataaaaggaaagtaatttttaaaatatctattttaaaatataaatgctttgacatgccagcactttacagcatgataaattagttaaatggttatacctgtagacttaccagtgtatgaaactactgatgcaactcgatataggtgtatggtactagagacataagcagcaatgctcttctgagatagattttctgaaattttgagcagctttatgataaagttctggaggaaaaggacaaaatttcttcaattcacatttatatctctttgattataagacacatcttttttccccacattttatttaagttcaggggtatatgtgcaggatatataggtaaacgtgtcactggggtttgttgtatagattatttcatcacccagatattaaacttagtacctatgagttatttttcattatcttctccctctcccaaccctccatccttagataaaccccagtgtgtgttgttcgtccatgtgttctcatcatttagctcccacctataagagaattcgtggtatttggtttcctgttcctgctttagtttgctaaagataatggcctacagctccatccatgttcctgcaaaggacatgatctcattcttttttatggctgcatagtattctgtggtgtatatgtaccacattttctttatctagcctatcattgatgagcatttaggttgattccatggctttgctatgtgaataacactgcagtgaatatagacatgcatgtgtctttatgatagaatgacttatattcctttgggtaaatacctattaatgggattgcttggccaaacaatctgtctgttttgaggtctctgaagaatcaccacactatattccacaatggatgaactaatttctactcccaccaacagtgtataagcattccttcttctccacaacctcgccagcatctgttttttactttttaataatagccattctgactggtatgagatagtatctcattgtggttttgtttgcatttctctaataatcagtgatgttgagctttttttttcacatgaatattggctgcatgtatgtctttcttagaaaaatatctgtccatgtcctttgcccactttttaatagagttctttgttttttcttgtgaatttaagttccttatagatgctggatattagacttttgtcacatgcatagtttgaaaaaattttctcccattctgtagattgtcctttcactctgctgatggttttctttgctgtgcagaagctctttagtttaattagataccatttgtcaatttttgcttttgttgcaattgtttttggtgtctctgtcatgaaatctttgtccattcctatgtccagaatggtatttcctaggttgtcttccagggtttttatagttttgggttttacatttaagtctttaattcatcttgatttaatttttgtgtatggtataaggaaggggtccagtttcactcttttgcatatgattagccaattatcccagtaccatctattgaatagggaatcctttcctcattgtttgtttttgtcaggtttgttgaagatcagatacctgtaggtgtgcagtcttatttctgggttctgtattctgttccattggtctacgtgtctgtatttgtatcagtaccatgctgttttggttactgtagccctgtattattgtttgaagttgggtagtgtgatgcctcaagatttgttctttttgtttaggattgccttgggtatttgggctctttttggcttccatttgagttttaaaatagtttttctagttctgtgaagaatgtcaatggtagtttaataggaatagcactgaatctataaattgctttgggcagtaggaccattataacaatattgattcttcctgttcatgagtgtgtaatgtttttcctttatgcatctccgatttctttgagcagtgttttgtcgttatccttgtagagaactttaatctctgtggttaggtgtattcctaggtactttatttatttatttatttatttgttgagacagagtctcactctgtcacctaggctggagtgcagtggtgcgatatcagttcaccgcaagctctgcctcccaggttcacgccactctcctgcctcagcctcccgaggtactttatttttttgtgtggctattgtgaatgggattgccttcctgatttggccctcagcttgactgtttttggtgtgtaggaatgctagtgatatttgcacattgattttgtatcctgagactttgctgatgttatcagcttaagggctgagactatggggttttctagatacaggatcatgtagtctgcaaagcgggatagtttgacttcctctctttggatgcactttctttctttctcttgcctgattgccctggccaggacttccaatactgtgttgaataggagtggaaagagcaggcatccttgtgttgtgctgcttttccagaagaatgtgtccagcttttgcctattcattatgatgttggctgtgggtttgtcatagatggctcttgttattttgaggtatgttctttcaatacctactttgagagtttttaacatgaaggagtgttgaattttattgaaggccttttctgcatctattgatataatcatatggtttttgtctttagttctgtttatgtgatgaatcacatcattaatttgtgtttgttgaaccaaccttacatcccaaggataaagcctgcttgatcatggtggataagctttttgatgtgcggctggatttggtttgctagtagtttgtggaggacttttgcattgatgttcagcaaagatattggcctgaaattttctctttctgttgtatctctgccaggttttggcatcaggatgatgttggcctcatagaataagttagggaggattccctccttttcattttttttggaataatttcagtagggatgatactagttcttctttgtacatctggtagaattcagctgtaaatctgtctggtcctggggtttctgttgttgttgttgttgttgttttggttggtaggctttttattactgattacatttcagaactcaatattggtctgttcctggattcagtttcttcctagttaagtcttaggaggttgtatgtatccaggaatttatccatttcttccagattttctactttatgagcatagaggtgttcataatattctctgatggttgtttgtatttctgtaggatcagtggtaatatcctccttgtcacttctgattgtgtttatttgaatcctctctctttttatctttattagtctagctaatggtctgttttattaatgttttcagaaaaccagctcctggattcgttgatctttgaaattttttgtgtgtctaaatctccttcagttcagccctgatttggttatttcatgtcttttgcatgctttaggatttgtttgctcctggttctctatttcttctagttgtgatattaggtttttaacttaagatctttctaactttttgatgtgggaatttagtgctataaatttccttcttaacattgccttagctgtgtcccagagattctggtatgttgtctctttattctgattagtttcaaagaacttcttgatttttgccttaatttcattatttactcaaaagtcattcaggagcaggttattcaatttccatgtaactgtatggttttgagtgaatttctttgtcttgatttctaatttgattttgctgtggttcaagagattttttgttataatttcagttctttggcatttgctgatgagtgttttacttccaattatgtgatcaattttagagtatatgccatgtgggaatgagaagaatgtatattctgctattttggggtggagagttctgtagatgtctatcaggttcatttgattcagtgctgagttcaggtcctaaatatctttgttaattttctgcctcaacaatctaatattgtcagtggtgtgttaaagtctcccgctattaatgtgtaggagtctacgtctctttgaagggatctaagaacttgctttatgaatctgggtgctcctgtgttgggtgcatagttaggtcttcttattgaactgaatactgttttgccattatgtaatgcccttctttgtcttttttttttttatctttgttggtttaaagcctattttgtcagaagctaggattgcaacccttgcttttttctgttttccatttgcttggtgaattttctccatccctttattttgagcctatatatgtcattgcatgtgagatgggtctcttgaagacagcataccaataagtcttgattctttatccagcttaccattctgtgtcttttaattggggcatttaggccatttacattcaaggttagtaatgacgtgtgtggatttgatcctgtcatcatgaagctggctggtcattttgcagacttgtttatgtggttgctttataatgtccctaatctgtgtacttcagtgtgtttttgtagtggtcagtaatgatctttcctttccacatttagtgcttccttcaggggctcttgtaaagcagatcaggtggtaacaaatttggcatttgcttgtctgaaaaggatcttatttatcctttgcttatgatgcttagtttggctggatatgaaattctgggtggaaaattcttttaagaatgttgaacattggccctcaatgtcttctggcttgtaggatttccactaagaagtccaccataagtctgaggggcttccctttgtaggcaatctgccctttctctctagccacctttgacatttttctttcatttcagccttggagaatatgatgattatgtgtcttggggatgatcttgtgaagtatcttactggggttccctttatttcctgtatttgaatgttggcctctctcactaggttgtggaagttctcatggataatatcctgaaatatgttttcccagttggttccattctcctcatctctttaagggacaccaatgagttgtagatttggtctctttacataatcccatatttctcagaggttttgctcattccttttcattcttttttctctattcttgtctgactagccagtcttcaatctctgagagtgtttcctctgcttggtctattctactattaatacccatgattgcattatgaaattcttgtagtgtgtttttcagctctatcagatcggctacagtcttttctatactggctattttgtctgtcagctcttgcattgttttatcattattttcagcttccttggattgggtttcaatgtactctggtagctgaatggtcttcattcctatccatattctgaatgtcatttaagccatctcagcccagttcagaacccttactggagatgtgagcccatcctttggaggaaataaggcactttggctttttgagttgtcagggttcttgtgctgatttttttcttatctttgtggtcttgtgttccttcaatctttgaggttgctgacctttggatggtttttcttttatcctattatatttgatgaacttgagcatttgtggtgtaaggtggactcagccaactggctgtgtttctggaagatttttatggggccagcactcagctcccaagtcctacacttcaagctgtaattctgggggaacttatattaggccctgactttgttttctggctcctcaaggttaggaattcactgtgttgggggaactgaggtgctcccggaccactgttcactacactttgatgggtggtatcagccaaagtgtttcatattgcagcaacagggggatctgtcttcgttcacatgtgccagcagcagtggtagtaacagctgcagcagagtgctagcaggtgccatgctagcaggcgccatgctagcaggcattcaccacagtggcagaggaaatgcagctgcaggggtggggagtggaaggagtggccccagatggtgactgtgtgcacagtcatgctggaggtggtgttgactcaggggtgggtcactgatgggcacaggtctgggtgccttttctgtgccctgcaagcaggagtgattgctcagggcagggaaggatctgctgttctctgtgtagtgttagtgcaagggtggggtgctggcagggactgggctggctggctctgtgcccaccaaggctctgtctacaatggcagtcagcagggggagtggagtagacagcactcccacatgctggtggggcagtgaaagcagaatctgcccatacagacgtgctagcaaagtgatgtggggagttggtgtgagcccaggggaagctgcattatgaggagagagcatgcaggctggcacatggctgtagtggccaccccactggagctccctgctggttaagcatggtccaccagcacagaaggtatggtgtgggcccccagggaacccgagaccaccctgcaagcaggaatggccaggctggggccccaggagaggccagcaaatcaaggggtgctcaagtcagacctgcccagtctgatggacaagaccactctgcagagttcagatctgacagttcccctagggttaacatctcctatgtgagcaagtcaagcctagaggggacagccttccctagttgtgctctgctacagatgctcccacatcaaaccctctgggttctgcatcagatggcttgctgcccctaccccttctctaattagctctctctgccaccttgagtgtccatggtggtcaaggggttcccttctgccagggttccagaggccgcgtgagagtaggttgctccttgccagttcaactcacccattcccttggagccagtggaagccaggaatgagtcctggtgtgcagtagccccatgcagggttcccagctttctccccttttaacccagtttctttttccacactttaacatctctgaaatgactatccatgatataatcaatggcatcttacaactgctaccagcagaacagcagtcatggtatactagtcatccaggaggtgtgaacttggctgttagtcttgccgacattattggacaactgcaacctcttgacgtttcaatcagtaaactctttaagagccatttgaggaaggaaaataagccttatttgttccctgaaaatattctgttgatatcttctggtaaagtcaagaaagtgccagcatcaaaacttgcagaatgagtactggaggcttaggggaaaaaatctcagaagcatactgttattagtagtagaacattctactaagatatgttgtcatcatcaaaattattcaagaattttgaatagtaattaagattactattataaatgggaaaataattagaatagtgaaactagtttatttcactcataatttactttgtatatatacctatgagtgatatatgataaaactacatttttaaaatcaaaaggtctttcaatatgtatacaataaaaatcctaagaattagaaagctttgtgtcagagtttaattgaaagttattttctttctttttcttactttctttcttagtgttaactaatggcttattttacaatcaatacttttagagcagatgaaataaatccttgtaaaaatacagcacatatctaaaaagtgcaaattttttgttttcatatgtgaaatactcatgtgccacataatgatgtttcatcaaatgatggatcacatatccaacagtaaaattatgatggagctgaaaatttcctatggcttagtgtcatcacagcctgagtaatgctgtagccctcataaggtcatagtataactcattactcatgtattggtggtaatgctggtataaacaaacctactacactgctaatcatataaaagtatagcacatacaattaggtacagtacataatacttgataaaacataaatgactatgttactggcttatgtatttactatactatatgtgattgtagaggatactctttctacttattaaaaagaaaacttaactgtaaaatagcctcaggcagatccttcaggtggtattccagaagaaggcatttttatcacagaagatgacaactcagtatgtgttactgcctctgaagaccttctattgggacaagatgttgaggtagaagacagtgatattgataatcgggagcatggctatgcctaggctaatgtgtgtgtttgtgtcttcatttttaacaaaaaagtttaaaaagttgaaaaaaaagaaaaaatattagaaaaaagcttataaattaaagatataaatatttttgtacagctgtacaatatttgtgttctaagctaagtgtcattataaaagactcaaaaagttttaaaaagttaaaacataaagtaaaaaagttacagtaagctaaggttaatttattattggagaaagaaaaatttttttataaacttagtgtcccaaagtgtacaatgtttataaaatgtacaatagcatattagtccattttcacactgctataaagaactgcctgagactgggtaatttataaagaaaagaggtttaattgactgacagttccgtatgcctgaggagccctcaggaaacttacaatcatgacagaaggtgaaggggaagcaaggcacatctaaccatgacaaagcttgagagagagagagagagagcaagccacatacttttaaacccccagatctcatgagagctcactataaaaagaacagtaaggaggaagtctgcccccatgattcagtcacctcccaccaggcccctctgacatgtaaggattacaatttgagatgagatttgggtggggacacagagccaaaccgtatcaagtagtgtacagtaatgtcctagaccttcacatgcgcttaccactcactcactgactcacccagatcaacttccagtcctacaggctccattaatggtaagtgtcctatacaggtataccattttaaaatattttatgccatctttttacagtagtttttctatgtagatatgttagttacacaacatatgttagatatgtttagttacacaaatacttgccattgtgttcctattgcttatagaattcagtacagtaatatgctgcacaggcttgtagcctaggagcaatagactataccatagagcctacatgtgtagtaggctatagcatttaggtttgtgtaagtatattgtatgatgtttgcacaatgatgaaattgcctaatgacacatttctcagaatgtctcattgttaagtgaaacatgactgaactgctatgttctagacttaaaaaataatgaatttttcatctacatgaatgttttgagctggaaaattattttatatagggcactatccctcacattcacgatgtctagcatccctaatgcccttaatgaataccagctgcagccctattcatcgtaataaccaaaattactactgaaaatttcccaaatatcccctagagggaggtatgcatatacattgagaatcaagttttctaaatgcctgtagctgtgatattcccattcctggtcactagagggaggaagtagtctttaggatgatagtacgattctgttttgtctgccctcaaagttcaagtttaagctgatatagatcagcttggcaaaaatagatcatatttcagtaaaataactgtggcatagtttctcacatatgtttggtactctttattattacaatggaatcacatttctattttatttaggctatcactgttacaaaagtaatattttctcaggctaattatctagttatgatcactgcctgtgataatactttaaaaaaaaaaagaaaaaaaaaaacctcatatgctcctgctttcaccagtcttaagagaaaccagagacaaaggctctgacctgaatgaccccacacctttgtatgctggttaaagatgcaccctttgaaatcaaacagatctgacgtcaagtcccagttctgttacttactagctgtttaatttaggcaagtcacttcagctctctaagccacaatttactcatatacaaaatgaatataataaaacaacttacagaattatcatgaaggtgaaatgagatatctgtgaagtgtttttcacaatatgctttcaataaatagaagctgacttgctcatttttattatttttatgctaagaattacattaaataaacaatattgtaggcagtataaaatcaatgtcaaattctattatgaaactgtaattgtataaaagttgagaaacaaaagtcatccatgtaaaataagtgaaaggtttgtggaagaaaagaagagttgaattggaccaagtagattggataccatttgaataatctgaggaagtcatgaaacactagcacatagtaataatgcttgtccactatgttacagttaattcctaatgattctagacatatggtattttgggctgatagggaaaacaaccctttttgctctaactaaagtgctttaccacattcttccacatatcactttaaagactttataaaatatattaagaaaaaactagatgcatgaaatacatacttttaatagctgactttaagcagacttggttgctcaaagtcacattttctgtgaggaacatacagtctgtatttcaaaccaagtttgacctgaaaatctttgcttataatagactaacacattcagttcatcaatattggatcaagactggaacacagccactctctgaaatcacattccaattaaacatctaccatgctaagaatgtaagatataaagatgaagaagacacagtcttctgctctgatagagttatactttagtaaagaagagctaaatacaaataaatagagagtaaaaaatttctgggaaaagaaaacaattctggaaaaacaaggtactgaaatatgattacaccttgtaaacattctatttctgggagctgcaaggccaaaaataagcaagccccactcttgcctaatatactcagtgctcaatgctcaccttgaaattacatttccctcattgttgatgaaattgcagaggagttatcaaaactgacccaagagaagtttggccattaagcaaaatggttaacaacaagagcatgttgtaccatgcacctgtttttaaagccatctgaacacaactcttaattgtattgtccaaggttaagttggagtttggtgaagaggatgataattaagtactacatgcctcttataagtaatcgctctattgactaaacctcaataaatatacattatttatttactagtgatatcaatagttctttacatctcagcagccaaactccagaagaatattaaaatatttgaactgctttggtccattctatttctctggaaagtacaactaagcaatttaattcaggcagtagatataaaaaattacatttttaaagacaggatacagttatctgataggatttggagaccttctattgtttaacataaacatatcccttttaaaagctacttgtgaatgaattaggaataactttcaactaagatcaagctattcaaacttaattaggattttagatatatttttatggcaaatttagttacaagctgcttcaatatggtgcaaagtgtcttagctggaaatgagaaaccctaattgaatgcagcccatgttaccttcgtcttggataatacacttctctttcctgagcccctatttccctatccattaaatggagatagtgacactgcaactacaaaatgagagcatatatggaagttactgatatatctaataatttgttgagattgtgaagacagagatatgtacttgatgcagaattagatatccaaagcccaaattgtgaccccacagggtagggaacttatttgtgattaataatataggtaaatgtcttgttttgctttattttgtttttataatggtaacaattaaggaaactgaatcaactggagatgaagcagaagcagcagctgagtttaggacaatggttcccaaatgattgatagcaggcattagaatcacttggcacattggttaaaaccggtttctaggcctcaccttcagagttctgtttcagtagctcatgggtggggttcgaaaatctgcatttctaacaagatccaggtggtgcagatactgctggtctggagaacactctttatgatccacagctttagggtaatggaaaggagcagttggagctgaagaagtcagagaaaagcatcttgtaagcatctaaatggtcagaaatggaaaaggaagctcagagagattcttgagagggccccagggaatgtcaatcctatttacaggacaatatgtcctaagcagacttcacttcaatgaccagaggatgacagacctcagtttgtaaactaagagaatcttgagaaaggtcaattttggcctggaattgaaagagaaataagtttttaaaaaggaatttcattattagaattataaataaaatcatgcaacagtaagaactcacaaataagatcttgtaagtagagtcagcaatttttaccaccaaggaagagaagccaaaagactggagatgggcaaatgaagttctattttttaaattatcaataatattttaaaatctatttattgaggtataatttacttacactaaaatgcataaatcttaaatatatacttggacaagttttgaaaagtggatacacctgtgttatcacccaactcaagatatggagcactattacccctgcaaatgtcctcaagctttaccgttactcccctcaaccttgaggctaccattcctgggatttctatcaccataaaaaagttttctatgctagtgaatttcatatacatggaatcatataatatatattcctttgacatctttcacttaacatgtctctgagattcatccatgttgatgatcaataggttgttcctctttattgttgagtggtgttccattgtatgaatataccataatttgttcattcactcacttgttggtgaacatttgggctgtttctagtttggggctgttataaataaaactgctatgaccattcctgtgctacatgtaaattatactttattaaagaaaacaacaaataccaagtatctattaaaacatctttggacactttaaaagagcaaatagtgatcaacagaagtaaagcatatcactaagaaatcatttccttttttggcaagggaatttcaaagacagacgacacctgctgttatgaattttaaagacctcttttgttgaattcaggttaattccattctgcaagaccacaggggggaaactatgaaatagatatactgaaactctacgatataccaggctctttgcaatagctggatgtttataaggtggcaaatttgaatcaatttgacaaaactgggaagggagtatgtattccctaacttaaggagttcaagaaaaggtaagccatgattctcaaactcagctgcactttaggctgtaatttaattggttcagggtagagtcttggcatcagtattttttgaaagctcaaagctatatataatgatcagccaggtttgagaaccatgaagctagatgactatttgtctgaatgtaaattaaatgagaaattaaaattgagaggaagacaaatggaaattttaattgattgcatattatatgctagacatgatgcttgctgtctaacctctatattataactatattaatacttgaaatctcttagcacagtgtcaggcgcaaagtaagctctcaaatgtttctgttgttatcttctctgtaaccttataatgcagtctccaaatgcatcctaaaacattagcttatactgcaagttttatcatccctacattatggataaggaaaccaagattcagagtagtttattttgggaaatgcaatacatggtaattgtaaaaccgggatttaatcctaatttaaagctagtatgccttctctgcccatcaggtcatatctaagacatataggtgttcacaaaaattagtaacttacttaaatgaccctttcctttttaattgaaccatttccttttacctgttctcaaagaaattaccttaaatacaaatcctaaaaaaagtgaagccaaaaagtagacatccacatttttcctaatgtggcttgatagaaactcttctataggtcttgacaacctctgaggtcagagagaatggattaagatggcccttcagagctcaaagcacttaacatggagaaagtactgcttccaagtaaaacacctcccataataataaatgcatagagagcatacctgtcacttctatatagtctaggactttaattatataataatgttgaaggaaaggaagtcagtcctgagggggatggtcaactcctctcagccaggctggtcctctctgagtttgcttgtgtgcagtagatgttttgaatgtgtgtatttgctgcagaaaaaaaggaaacattcaaggaacggtacccccctcaatgagcctgagttcctcaagggcaaagacaacctttactatcccattcaatccttacttatgctagtattcaataaacaactactgcaagattacaattacagaccactaattttcaaaaagtatgtttttttgtttttttttttttttgagacgaagtctctcttgtccccaggctggagtgccatggctcaatcttggctcactgcagcctccacctcttgggttcaagcgattctcctgcctcagcctcccgagtagctggaattacaggcgcctgccaccacacccagctaatttttgtaattttagtagagacggggtttcaccatgttggccaggctggtctcgaactcctgacctcaggtgatccagccgcctcggcctcccaaagtgctgggatttcaggcgtgagccaccctgcccggctgctttttcaagtagtacgcgttcattgaactgacttaatgcagagctagactcagatattttccttttctgttgctagccaactgttaaaatacgactgaaaatattttctgaacatcatgtacatttgtaaactaaaaatagagcatttggccgggcacagtggctcacgcctgtaatcccagcattttgggaggccgaggcaggcacatcgcctgaggtcgggagtttgagaccagcgtgaccaacatggagaaaccccatctctctaccaaaaacacaaaattagccgggcgtggtggcgcatgcctataatcccagctactggggaggctgaggcaggagaatcgcttgaacccaggaggcagaggttgcggtgagcggaagcttgccatgagccgagatggtgccattgcactccagcctgagcaacaagagcaaaactctgtctcaaaaaaaaaaaaaagagcattttactttagaaaatatgcatatattggtcttaaaagtcactaaaaattaaaccaatataactgtgtcaatttggcatcaaaatctaccctgcctatatcaagaaagtgttgcacagtacattttgcaaaatattcagtgcatcttaagtactcaagaacagttcattaaagaaattttactcaccttctttttacccattggccttgaatttaagcaagataacccttatcttagtcacaagaagcttcaggaggagaaagtattaacatgtttaatttttacagatattttatatgctttcagatattcctcaggaagtcgagacatgctgtcctatgtaattttagatttactagtagccacattaaacaatggcaaaatgaggataattaatttttcaatatattttaacacaatgtcaaaaatatttcaacatgcaatcaatatgaaaaaaattgagatattttaacatttttctttccatactgagtcttcaaaatccagtgtgaattttatatttatagatctcaattcagactagccacatttcaagtgctcaatagccactggtggctaaaagttactgtattggacaacacacatctagagtctaacccccttctatctccagtataatcaccttaaaatgtacaaagtatataaaaggtaacccaaaattaagtagtgctctgttaaaatgcaagtgaaagatttaatgttgaaagtgtttagacgttttctaatgactaaaaggggaaatagttatttaggaatggcattgcaaatctttttgacattttcccatttgctcattaaatctttctgagaactaggttattttgttctttttcctccatctgagttttgtcattcaatatttatctgctgacaactatgcaaaacattatgctagatgggctgggtgcggtggctcacgcctgtaatcccagcactttgggaggctgaggtgggctgatcacgaggtcaggagatggagaccatcctggctaacatggtgaaaccccatctctactaaaaatacaaaaaattagccgggcgtggtagcacgtgcctgtagtcccagctactcgggaggctgatgctggagaactgcttgaaaccgggaggcggaagttgcagtgagccgagatcgcgccacttgcgctccagcctgggcaagagtgggactctatctcaaaaaaaaaaaaaaaaaatgctagatgcaatgaaccatgtaaaatgcactgcatctccactttcacaaagtttccaaactactgagaggaaaagagtgaacatgggaaaaacatgaaaatataatctctgtattttattttactgtatcactctgttaattctttgtttgcttatcagtccttccccagttccccaaagaagggaatggactttatcttcttactctttttctctatttgtggaattcactgtaatgaataattatgttaattttctagaacagaggtccctccaaagtacactaagtgcataaagaaacatttatctcctctatggggaacagaaagactttggcagaggaattaccaagggcaggccttgaaggatttgacagaagagaacagtgaggaagtttaaagaaaaaaaggaagtttttacagatgagaaagtatgaaaatagaggagtacatcacatatgataggtactccctgcatacaagttaataaaaagaagagcctgaataacctgagaatataatttatggagacagaaatggaggatttgagcaactgaaggggaggttgtgctgcataaactacatggaaaaaagtgattgagtaagcagttgcaactgctaacgttttaaggcaaactaccttggaaggtaccaaacataccgtgccctgctttcttctctttgggataatgtctattgtgtccatttaaggactttaatgattctgtaatttttagttaacatcaatttaaggactttaatgattttaatccattaagaactttaatgattttaatccattaagaactttaatggattaaaggactttaatgattccataatttttaattaatatgaacaacttcattcaagcattacatttatgggtaaggtgaaaaataagaaatctagcagaacaacatgcttttattttaccatcatgcataaaaaggaagacaaatatgccaatggtacacttccaatttgtcagagcaatttcacagtatttaagcaatttaggaaaaaagatatatcacttactaagttgttaccagggaaaattatcatgtaagacaatcaattaaaccatacttttgtagattatttttccatgaaggcaatttgacaagcctaacaaagaccaagttgttcaaactatgtttctaggaatatagtttaacagaaacaagaacaagttgaaaactgttatgactattcatatgtctctatattgtacaggcaagtaagactgttgttcttccaaatgttcccaattgaaatcaaaagaatatctgtacagctcaattttcacaataagtttagaatcagaaaaaaaaattttactaaatcctaatgaaataacaatcttccacataaattaggtcacaaaacaagtaagaaagcattcaaagttgcgctgtctttctttaaagaacccttgtctaggcaacatatttaacactttaaccccttcaattctccctgaaaagtatttttccattcatcatcattggggagtaagtactccttcctcgaaagctcttaacgacagcacagtcttcactctaggcccaatttttacctggcccatgcctctagccttttgttcagtttctcctgcttagggcacctttcatcccatctagatgtgtctctctttaactattctaggagttgataaaagggctaggaagtaggaagttgggaagaaggggaggggcgtaagagctctagcactctattttacaggccaacttctttgcctctgaaaatgacagagccaaaatgaaataaaaaccttgcttttacaaatgtttctgagctatcacttttttaagagaggattgggaggctaaggagggcggatcacgagatcggggttcgagaccagcctggccagcatggtgaaaccccgtctctactaaaaatataaaaattagccgggcgtggcggcgcgcgcctgtagtcccagctactcgggaggctgaggcaggagaatcgcttgaacccgggaggtggaggttgcagtgagccgagatcgcgccactgcactccaacctgggcgacagagcaagactccgtcctccgtctcaaaaaaaaaaaaaaaaaaaaaaaaaaggaaaacagggagagagagggaccttggcaggagccaatgtagggcaggtagcaatagaaagtgactagaggtgaaggaagagcaatgaagtaccataaatcacacagaacaagtggctcactgcttttctcctctgagttcattaacgtccagtaactgtccacagggcatgtgcccatactgctcaatgcagagctgagtaggtggaacaggctcccaaagctagaaatccaagtgacagcaaccagttcagaggccctgggaataaacagggtccaagcagtgcagataaaggcagtacaatctacagtatcatttgcttggcttacaagtagtgtgaaggatgacctcgtagcatgtgatattccagaacagcatgaaggtcatatggaagtggagaagcatacccaccaccgtctcaatcttgaggttgagagaactgaatatccaaaggaaacagggtgcagaaaagtcagcaaaaacaaagcacaatagaaggcatactcattgctgatgcccaagcacaggtccagcagaaggtggtaggagaccttgtgcaggagtattcccaagggcaaatgttaaccagactggaacccaaagggcctggggatctctacaggctcccttagcgggcgacgtcgggctctacggactccttcacgcaacaggtagtattgcagtggatttggccacagatcctctttaataatctcagcaattttgtcggactctggaaggctgtggtctgaaaaccaagtgaagaagctgcagatgaggtcttggtttctgcgaatgaaggactggggttcatgccccctgcgccatataattggagtagaaagagacaccactcggccggaggatcttacctcatattccttgacaatcagcttgtttctgaagtaggggtttcttctaaagaagaacttgaacttgcaaccggttctagggtgtctgagttccttcacctctaaattggttatgtaccttaacatctctgcatcttggcccctaatcatggcggacaactgggggtggtttcgaaaagcagtcatccagaagcccgggatattctgaatgatgtagttcctccgctccaggtagtgtcgacgcatccgcccaaacttgtgctccagctgttggaaggccctgtcggcctgagcattcacagtgtccagttccagctggatggcctccagagggtccatgcggagagcctcatgcaaaggccagggcccttcttcctccctcgcctcctcctccaatctatcctcctccgccacttctatttcttcaccttctggcggctgctcctctacctccatctgctcctccattacctccttctccgccaggccttccttcaccacctcagcgctctccctctcagccacggctgctgagacggtggcgcactttcctgtcttcacctcctccgcctcagcctccgcccccgccgtcagctcagacgcggatctctgggcgccacagatttctagggccttctctccaccctgaacgccctttttcaggctgcggtcggctgccatcaccacagaagcggctgccaggccttcggcgggaggctggccctcttcctgcccggctttgatcgccacatgaccgcgacccccaacaactcggatctggggagtaccgccacggcccgcggcatcctggggtacgcccccctcctctgaaggcggtggaggcgggagcgcgacggtctccgagcctccctcacccggctccgccatcacctgtgtcgcctcgctttggtcgcggagcctcaggtactggtgtgcgtcctggtcgctcgggacttggtcagaaataatgatgctgtgggtttggaggggagtggtcctcttgaccccatccaggccgctcatgttgctaacagtcggaccaaccgcaggcgaacgcccgttttcctcagaggccgaactgggagctaaccgccgctcgcaccgcccaccctacagtctcactaacatttcagcggcggtgtcgtcaggactggagatctcacggtatcgcgagaacttgctgagcccgggattggttccgccgctccctgccagccaaccggattctctgggctttatttctgtgaatttacccatagcaacagtaattttacctacgtaaataaatgtcgattgtgctgagtctggaagcgcggacgacccaccttgagatgcatctagcgactgctcccagcatgtaggagcagttgtaaaatcacagccgtaacagtgcctgctctccagtgtctgaaaacaaatgtttttctggtcttcacttttttgaggcaggaaggtaaatctattccctgttactccacgtaactagcagcaaaagacttctctttaagattaatagcaaaatgtttccccccttcttagtaaaagtgacataaaaatatcaattcttgcctctacggttactggggaaaaaaagctactcagcagcctcttaccactaaagcgatgcatagtattcattgctaattttcgatttataatctgcatcaaataagagtttgtgctgcatagtatcggtagaaattaagccaggatcagtttgctaaatgttccatgccttttcactgcaagaaagaggaaattataactatttccagccccaagaacttaatttattatcatatttagttatgtaagataggaatgtttggctctaacgaagcatctgtctttagcaatcagctgagttcattagagggggatgtcaatgtctctggttgaagtgttccagtttgttgacttgtgagttaaactggtgctgtcttagagagctacaaggcctcagagaaatatcagtggggggagccacataccaccattttgtgaggaaaggctagttaaaatggacaactaagatggccttgaagtagaaaacaaacttgcaaagggcaacatgcagctggtggactcaaggtataaaagaggcaaacgttattttctacttaatttgctttgtgtggtagtagcctgatggccctcaaagatgtacctgtcttagttatgcggccaaagggacttcgcagatatgattaagttaaagatttggagatgagaagatgattctggattatacaggtgggccctatggaattacaaatttcttataagaaggaggcaggagggtcagtcagagaagataagaggacgaaagcacagagagagggaaggaatggtggagaataggtgtgggagggaggaaagggaaatcgctatgttgctggctttgaagatggaggaaggagccaggatcgtaggaataaaggcagcctctagaagcttgaaaggtaaggaaatagattcaatcctagagcctccaaaggaatgacaacaccttgaggttattacctctaaactccagcactataagaaaataaatttgtgcattttaagctattaaatttgtggtaatttgttacagaagcaatatgaaatgaatacaccttggattaaggtttggttgcatctatgggtgcctcaagttgtttctaatagcagccccttctaccttgctcatggcttcccgtgagttcctgcccaacagctgtgatgtattacagcttgaatctgtctttcaatatcaagaccagaaatatacttaggcaaatgcacagaaagacaaaattaaagcctaaacataccacaaacgatatctgaggagactgtaaactgcaagaggacatgatcatggtttcgtttccctctgtttatcgagtgcctagcacactaccttacacagtatcccatagattattaaaatgttaaataaaggagcaaatgagcagaaaacagtttctcttgcttgcaacttgctccttgcggaagagaagtaaggggcatatgggttgtcactctgctctccttcctatctgccactggcaaaccagagggctgctctattctatatagtaacagtttcctactcaggagaatgaatttctatatatgtttcaaaggctctaaaaggataggaaaaacacagagaaaacaattttattttacaaataatttaagtttgtgtggtcacactgtatgacaaacgaactctgaaaagaccagcatatttaggtgagtttacatatcaaagcctcggactaccagcactgtatttccaattctctcctttctgaaaaagtcaaggtaatcatttcaggctttacttcgtttctgtctacagaaatatataatgcatttctctctacaagtgatggagcctgtgatgcatggctggaattacttttggtgtaaataaaaaggaatattggaactttccacaaagactgtttctaattgccatgaaatcatcttctattttgaactggtataatttcattcggcctaaagtggaaacttctattattccaatatgtctcctatttttttttaagcagaaaggagtgtcaggcttggaccaatcttagaatatatggctttatttgtcaaagaagccattatgtaattaatgtaattaacactcttaccagtaatgctaggaaaactctaattaggatcatgtaagtataatcaggactctgctgaatgtaatttcccccaaataacgttgagactctttaaaggaactcttccttctcttcttgtcgaacatgtataaagctgtgataaggaatatttgaatatatagagaacgtgatttaaaattagaagtaatgtatctcatgttctctgtgtattagaagaaaattacattagagaagtgattgtgattataactattccttgtaggtgatggaaagctcaggttatgattgctttcggacaagtgctcaggagaagggtcagtaaagggcaaggattttagagggaaaagcaaatatgcatactttatgtcctatttttttttaaagaaagaatctttgcttggaaggaggaactctctaggaatgtcaacatgcaccaaggctcacgtgctcagggagttattttgccatacaggcaaagctgtggttgctattcaacacagaatattgtacttattatagtaggactattacttgtggattttttgttcacctttttgtatctaaaaaggcttaaaaaggatacctgtttcttttacatgacacaggttatcctgctatctgggaattctctttctgggtagatgttacacattctctaagacttaccaaaaacctgtcttgctttaaaatgtgctaggcattttacatgcattaaagtgtcaaatttcataaaagaggaaacagtaacactgagaggctaactaactttaccaaagtcatacataaagtaactggtaaattctttctcccttctcctgagtgcatctttcctaagtagcctatggctccttaatcttcctcacctgaattcctgcaactcttttatgagctgcaccatgcagtttagcacttaattgtgcttctcctcttagggactagttgatttatatgtgtcagtctcatcatcccagcattccagcatcatctcatgggatgggagcatagttgcagcttcttttgcatttattcatcatagcatggggctcaggtttgggtagattctttgttgttgttgttgttgttgttgttgttgttgttgttatggagtctcactctgtcgcccaggctggagtgcagtggcatgatcttggctcactgcaacctctgcctcccaggttcaagcaattctcctgcctcagcctcccgtgtagctgggactacagacactggccaccacacacggctaatttttgtatttttagtagagaaggggtttccccacgttggtcaggctggtctcgaattcccgacctcaggtgatccgcccgcctcagcctcccaaagtgctgggattacaggcatgagccactgcgcccggctagatttgggtagattcttaacaatatttgttcatttgaataaaataaacctcaaattatcttacaaaaacaacagtgtatctgtactggcatattttatttgcagaggaaatacattttggctatgcttcatatatcaccttttttgcactttaaaatataggataaattggtccatgacagagcatttctgtaattgacaataaacttcactacccccaaagatagttgaatcttttctaatacagttctatgggaaaacatctgcaaaaaaccctgaggtttttctccataatatcaaggaatcatagattctttgggaatgatttctcaggtagcaaggagtttagcggaagttcagacatttttgttttgcagaaaggtaggttttatcattataattaatgatagctttcacttatttactgctcctgatgtaccagccacttttataaacaacatccagtgtgtcacatcttttagttgtcataagaaccccatgaggtaattgcatttatgaccttcgtgttactcaataggaaactgaggcaaagagagactgtcacttggccaaaatggtacagaaagtaatagacccatgattcgaacccagaaagtttgtctcaaaagcctgtactctctgaacaagtgtgaactcactttcttttttttattattattattatactttaagttctagggtacatgtgcacaatgtgcaggtttgttacatatgtatacttgtgccatgttggtgtgctgcacccattaactcgtcatttacacattaggtatatctcctaatgctatccctcccccctcccccctcccccaacctcatgataggccccggtgtgtgatgttccccaccctgtgtccaagtgttctcattgttcaattcccacctatgagtgataatatgcagtgtttggttttctgtccttgcaatagtttgctcagaatgatgatttccagcttcatccatgtcactacaaaggacatgacctcatccttttttatggctgcacagtattccatggtgtatatgtgccacgtttacttaatccagtctatcattgatggacatttgggttggttccaagtctttgctattgtgaataatgccgcaataaacatacatgtgcatgtgtctttatagcagcatgatttataatcctttgggtatatacccagtaatgggatggctgggtcaaatggtatttctagttctagatccctgaggactcgccacactgacttccacaatggttgaactactttagagtcccaccaacagtgtaaaagtgttcctatttctccacatcgtctccagcacctgttgtttgctgactttttaatgatcgccattctaactggtatgagatggtatctcattgtggttttgatttgcatttctctgatggccagtgatgatgagcattttttcatgtgtctgtaggctgtataaatgtcttcttttgagaagtgactgttcatatccctcgcccactttttgatggggttgtttgattttttcttgtaaatttgtttaagttctttgtagattctggatactagccctttgtcagatgggtagattgtaaaaattttctcccattctgtaggttgcctattcactctgatggtagtttcttttgctgtgtagaagttctttagtttaattagatcccatttgtcagttttggcttttgttgccattgcttttggtgttttagtcatgaaatccttgcccatgcctatgtcctgaatggtattgcctaggttttcttctagggtttttgtggttttaggtctaacatttaagtctttaatccatcttgaattaatttttgtatgcggtgtaaggaagggatccaatttcagctttctacatatggctagccagttttcccaacaccagttattcaatagggaatccttttcccatttcttgtttttctcagctttgtcaaagatcagatggttgtagatgtgtggtattatttctgagggctctgttctgttccattggtctatatctctgttttggtaccagtaccatgctgttttggttactgtagccttgtagtatagtttgaagtcaggtagtgtgatgcctccagctttgttctttttgcttaggattgtcttggcaatgcgggctcttttttggttccatatgaactttagaggagttttatccaattctgtgaagaaagtcattggtagcttgatggggatagcattgaatctataaattaccttgggcagtatggccattttcaggatattgattctttctatccatgagcatggaatgttcttccatttgtttgtgtcctcttttatttcgttgagcagtggtttgtagttctccttgaagaggtccttcacatcccttgtaagctggattcctaggtattttattctctttgaagcaattgtgaatggaaggtgaactcactttcttaaaatgtgtaaccatcattgatgttaacttgatacacaattttcttctctcttccctctttcccctatccacaagcatattaatataatatttgtaaggaaagtacccaattattttctttcttttcagaggagaagcagttattgatgatccccaaattcagtattttctcaactctatcagactgaatgccatctttttataacagatatcttctaaaagagtctttactttccttaaatgaaatttatagataatataacctgcctacacaggtaaatagaaaaacatcaatataatcacatcataaaagagaaataaaagtaatttataatattgtctattttgatatgtaaggacattaacattgcctacactgtaagaaatagcaaagtgattagaaagttatacttgttgatataatcaccatggatggagactgatatgggtatgttttacctgtgattcaaataccatggtgatgaggttttctgaaatggtgacccaatctttgttaagttctataaaagaaaaaggaaaagctccccttggtacatgttactgtatttcttccattataggaaatacatttcacatttcttaaatcaggatgtgtcttacaagcactgtcagccatgtgtcagtcattgcatcattaccatcatcactgcctgagcatgtgtgtatccggttattgttaccaatttctggacaaactaaagatcatctgaagaaagaatatgtgctgtttgttgccttaaaactttccattaatctctttgaaagactcaaaaaagtactgacatcaaaacttacaataatttatgcctggcttgaattaaaactcttctagacagaagagttgagcactgttctaggaaatattgcatcatcaaaacacttgatagcagagaggatagtattgcttggaaaaaaatatggatattgacacctctgagccaaactttcagtaaattttgtgaatatgaagttttatgaataccttaacaatttattttgcttttccctttcctttcatttatttccaagtatgatattttatttctgtctaaagcctaaaagagttctttttaaaaacataaaataattatgtataagaatgcatcatgtcatagtttaattggcagtgttttttctccttgtcttcctttcttggtgatacttaaataatactttgttttacaattgatgtctcaaattagatgaaataccataatttccttcctggaaagtttattgcacattaaatcagtgtaaacatgtttagtgtttatatgtaaaatgttaaattcgaggctcagataaatataaataggttttccctctgggaaggagagcattttttgttgagggagacttcccttggatagtatgatatctagcatccatgacaccacctaataaaagtagcaactctcattttttgtaattactaaaattcacatctacaaacttccaagacatccttaaggaaggtgcagctcctgctgagattgtcacttttaaatactgctaggcatgtcattcctattgatgctcactagagggagcaactggtctttaagaaagtgatgtatctagtctctgatggaagaactatgggatggtctttcactataaattaaatacttttttatttaaattgaatcacaaacttttattcccactaagctgtaattgttacaatgtatttttctcagacaagtttaggtttattatgatggctccaatactcaaattgtttacgtatctcataggagcctgcctacaaagtccctacgcagtcatgaatctgatttcaagttacagctctcctactcactagctgtttgactggagctagtcatctttctgagccacaatttcctcataggtaaaatggagattataatacatatttcacaagcctattatgaaaatgaaataagatatatataaagtgtactataagctttcaatgaatagaagatggtaatattatttgtattatgctaaaacttaggcatattaaagttagactattgtgcaaggtataatctggcactaaattttcaatttcctgtacacagctaactatatagaatttcagagaagaatataatccctgtggattagagtggtcagtggaagaaatgagccttgacttatattctgctatgggtgagcattgaatagcttgagaaagaagtggggcgtgaggacatagtaaccatacttgtccactgctccagctatttcaacatgcattcaagacctgcactgtccaatactataggcactagccatatgtgtctattttgatttaaattaattaaaatgaagtaaagtaaaaaattcagttcatcagtcacactaattacatttcaagtacttattagcaacatctgactagtggctgctatattggatctcatgcaacatttcatcatggcaagaagtttgttggacaacattattctagacatacagcatcttcaagtggtggaaaaaggtgtagttgctggaactaaaatgccataccacagaggtagcaggcacacattttataagagtcttaagggaaaaaaacaccttttgaaattcatactagcagcatttttgagcaaaaattttgtgtgtttataattgggagtatataagtagaagtacttatccactggctcacataacataaaaaggataatccaaatattatgttgcttcactataaaacttacatatttaaaataagttacaaaaatctgagccattacccttcagagagaggaatgaagctaaatgggtcaaattcaggaagtgttagttgaaaaatatgtgtaattaaattagttatttaaataaccaataaaatgtgtacttggtgggacaaacccctactgtatttttagtaaggtaaaatggtaaggtataataatttaaaagaaaatttaaaaataatgtacatgaaacaatgaaaatacttgcatagattttttaaagtcactatgaatcatagtgatttgtttgttactataccaaaaattcacagtcaagccatttaataaacatgactgttatatgtgaaagcatctcaatatcctaagattaagcaatttcatgcaaaggaaatatttctgtgtattttttaggtagtatttagatctgcagctaaaaccctttaaacattttgttagttgccattcatttaaaactccagagctcatgtatcatacaaaaatatcagaaatttcttttttaaatggaaatatagtcctagggtcaaagaaccttttcagaacaactagaccttcatgataaaaaaaataaaaataataaaaagtaaagaaaaccagccctcttgttttaaaacaaaattcatcaaggtcatttactactttccacatacaaattgattcaatatgaaaagttcatattatggtatccagcttaatactttggttgtcataacacttcatccattagctgagaactctgccttgtgagttctttggctctgagactatattataacttcactgggtttgtaagcaagccattctatgcacatctgttttaaaaatgtgacaggttgatttgaaaaataccatatttcattcatcatcataaatagaaatatttatatttattgaatatttactacataatagatactgtgttaaatgcttttcatatattatttaattgcctcacccctccattacataggtagtattcaccctgttgtgaagattaagaaatcccagagatatcaggtgacttgcctaaagttacatgactaataagtaatggagtatggatataaacccagtttattggcttcaaagctctttgtactatgccatgttgcttttctgatttcttgaaatctttgacagtaaccggggaactcaagggttactgccacctattttctaataacttcgttttcttggatctgtatcattagtgcctagcacctagaagattcttaggcagtgttggctgcattgattgaatgattccacactgatggctagcttaaacagccatggaaactttaattataatatattaatctaaacaggacatatggtttttaggagttaagtgccctcaggggaagcatttactaaatgtggggcacattttaaaagtaatatctcctgctactgctgatatttctaaattaacagtatttctagattctcagacttggggttcagagatttcacttgctgattaattaattcaaggatataagagctctagcaaataaatattttattaatttgtactgttctacactcaggagcaattattgaaaatcaaggtttgttatcaggaaatacatgaagtcttatttggaaataattccttaaaactcatcctgagaagagacaatctgcatccttcccacttagtatatcatctacccatttgtggtctctcataattggaaatatttccctaattccaaaagcagaaaggaatcctcttaactgctaacttctctcccaaagggagaaactttttccagccaacctcagtgaaattgttgattgaatgctgatcctagaactgcattatgaatgcaaaaaagtaaacaaagcacccattctaagtttgctcaattttctggccaccactgtgctctgcaatgtcatctgtagcacagaagattggaggcgtagacttgagaccagaccacttcgtctgttctttccaaactctctaaattcaaaacatttgttgaggtttatgcaggacacaagagttgtgggatggcatacaaaaatctgaaagtcatggactttgttcattagggaccacagtgttgtggagaagatagacacagaaacacataattataataccagatgaaacaaacaattataataccagatgataccaataattataatactaggagagtgttgttccagcaagagagatgtggacaaagggctttgggtgcacagaataggaaatttgtattcctatattgataagagagcttggtaagaattcagaggtgataattttgagatgagtcctaataagaaaaataaaattataataagagagagggggtgaaaattccaggttgactaaaataccctgaacaaagactcaaatacaagtagaagtccagccagcttgaggaaatgactgaaagatagggagattagttgggggtgatggttaggtaaaatggaatctgatagttaaaggctttttattatacattattatatgtttatgatatattaaatataattatatatatacatatttgttaatcctatgggtattagaggatattggaggcttttaaacaggggattgacatggacagtgtcagaaaataatattaattgccatatggaaaatgatgtgaaggttatatgattaaaggctgggatatcagttgtgaagtattataaaaatgcaggcaagggtagatgaggatatctttaggaatgtagtaactgacaacagaatatgtcagataaattgtagaaccaattgaaaaactagatatgaaagtagacaagaagttaaggaagactgatttgtttagtttgggtaacaaggatgggtggaaatgtgattgagttatggaatacaggaagaagatcgggttgtagtgggaggagagatcaacagttcagctacagacaaggagagtttcatgtgactctagggagatgttgggtatttgtagatcagatagatttgggtatttgtagagcaggagaagagtggggtttacagttagacttggaaatcttgagtgtttaggtgatagttgacatcatcagagtggacgagaacaccaggaagacaagtagaggaagaagaaaggaaggccaaaaatagagctctgaggaacactgacgtgaaagaaacagatgaggtggcacaagtagaggaaactgagaaatagccattagaggtagggaaagaaccagaagagtgttgtttcagtatgcaagggaagaatggacttcaggaagctaaggttcaagggatgcagccatattgagtgagatgaagactgggaagaaaagtttccgaattgggcggcagctatacagcatgggtgtctttagtgagagcaatttcagaaaagtagcaagacagaaaaattgcagagttgaaaaaatgaatgataaatgaacatatagatagtgtgtgaggccagttctttcataattgtcagtatagaaaaggggaaagactggatgacaagttcaaggagatgcagggttgagggaagaatgtttgtagggagcagcattgttgggagcagagtaaggatctgattattacactgaagtgttgaggaagcaaacaaacaaaaaaaaagaaaacaaactgaatgtcagtaagtagaagaaaggttggataaattatggcatgtttatacaactgaatattacgtaacctttaaaaggaataaattggatccaaagtagtgacctggaaaagcatccatgttaattagaaagatgtaaaagaacattgcagaccaataagtatatgctaattatattttaataaatattagctgacacccttgtatctatataaatgcaagaaatattaagaaaggatgtgtacccagttgccaacagtggtgatctctgggggatgaggatgggaaggggactttagcttattgcttcttagaattttaaagagaggtggtgacattaggaatgacttttacacattggatttaaaatatttttcagacaaacattaaagaaaaccctctcatacaatgatgagataatttaactttatataattaactacagaattcaaagaagaaaataacataaacgaacacatttgctttaataagttattgggcttgtatttaaagctgaagcaaaaacatttgctcagatgtgatattgagttcaaggtgaattaaaggtttttccttttctttttttcttttttttttttgacacggagtcttgctctgtcaccagactcgagtgcagtggcgtgatctcagctcactacaacctctgcctcccaggttcaagctattctcctgcctcagactcccaagtaattgggactacaggtgtgctccaccatgcccagctaatttttgtacttttgggagagacagggtttcaccatgatggtttgtttttcttaattctggaagatgaggccaatatttgtttgaagagtgatttaaaatagctgaaattcagtcaaaaacttaatttactgggttgtacctctttattatgaagtattggttgcttttaaaatgagctagaggccagacatggtagctcacatctataatcttaacactttcggagacaaaggcaacaagattgcttgagctcaggagttcaagatcagcctaggaaacatagcgagactttggctgtactaacaatagaaaaattagtcaggcatggtggtgtctggaggctgaactgggaggatcacctgagccagggagatcaaggctgcagtgagctatgatcacgccactgcactccagcctgggtgacagaatgagacgttgcctcaaaaagaaataaaaagagctagaagtgaccttggtgatctatttggtaatatttcttttgtctaaagtatgtttttaaaatatatatacaattagtaactagctaatagttaataaatatgtctatttttagaaaaatttattattttattttctatttttgagacaaggtctcactctgtcacccaggctggagtgcagtggcatgatcacagttctctgcagcctcgacctcctgggctcaagcaatcctcccacctcagcttcccaagtagctaggactacaggcatgtgccaccatgccagttaattttttaattttttgtagagatgaggtcttgctatgctgcccaggctggtcttgaactcctgggctcaagggatccttttggttcagcctcccaaagtgttgggattataggagtgagccactgtgcctggccaaaaatgattttatatggaacacttagaagcagggtgctggaattagcaaaaaacagttttcaagttaaacgtagtttagtaatcagaattgtattgacagtaacagattcattgtaaaatagaaatgctcctatattcatacattagtttaagtaagttaaataatctgtaaaccaactttcttggattgaattctgaggtcaagccaggttaatagaagggtcagggaagataggaaagccataaatatggttcttaaagcttgtgggcacaagaactcttggaatgaaggtagataggggaagtatttgtaaagggaagtgagaagatgtcaggaaagtcctgcaagtgggtacctgaatcatggcattaccagtggtttagcatatcagaacctcagcccagagtttcaccatctagtctctggtcccatcccgaagccagaaagaacataaggaaaaagaggagatgtgaataacaagtctctcctccaatttcctctcaccccatctttattaccaattaccagtggaaagcaaaatgatatatgcagaacaccccatctcaaagccctaaaggtggttaaatgagtagactactcaccaactccttactgagcacttcctatagtaagtatgataagtgatgaggatttaacgataaaagacactgttcatgccctcgagagactgcccacggtggggtggagggtgatttggaaataaatcatactgcagtgtgaaaacaggaatattaggtatattctaccaagtacaagctgaacacagaaaaaaagacctactgattgctgtggcggttggaggagcttcctagaagaagaaaggacacttgtgctaggacttgaaggcagaagaaaggtgggagaggagaagatgggaggagataggttcagggaacagcctaggcaaaggtgtggagggttgtggggagagagcgggagagtggatgaggaaggaaggcttgaatgtggcttggcttatatttgaaggactttgagactcgctgtggagtattatgttctgctgtggtcatcctattaaaccctgactacatccattgattttttttcctatttaaaatttcctatttaaaatatttccttccaaacattttttaatttcaaggtctttatgtaagatgagatgtgatccaacaactatactagcccacatgtgaaatgacaaggcagaaaccacaatacagaaaataaaataaaacagccttaatttaaatatttaaagtagagctgtctagattttcagaaagcaataatgtgtctcctggaaattgactgatatgttttttgacactgttagtttcagttatttttcaaggcatcactaaaccctggaagagaacagtcttaatttatagtttaagtaggtttatttaaggggaaaaagaaaattgcaagatgtcattttatttccattccaaaaataagcataacattatcatagaagcctctttgaaagtagaacttcattaattgggactccactgaggaaaatttttccataatctcatcagttttgcctttgcttagcaaaccatcattttatgattatcataaaccaataataaactaggcatattggaattatatttacaatatgaaagacagcacttttcattcaacctcatcaatcttggaaacctattttttcattaaataaatatttctgaaatcactaaaatgtgcctggtgacattctacatactggggatatatagctgtcccttggtatccaggggaattggttccagtaccccctcagataccaaaatccatggatgctgaagtccttgatagaaaatgatgtagtatttgtgtataacctacacacatcctaccctatacttcaaatcatctctacattattcatcatatctaatacaatgtaaatgatatgtaaacaatgttatactgtattattttttaatttgtattattgtttactgttacgtattttcttgaaatattttcaattcatggttggttaaatctgtagatgtagaacccttggatatgaagggtggactgtggggttgaacaagacatgctaaatccctgcctattaggagtttatattttgatgcgaggagaaagataataaatatgaaaacataaaaagataatttgaaggacccaagaaatgctctaaataaagtaatttaaaagtgtgactggggctaaggttttgtgtggaggtgatatttaagttagacctgagtggtgagaaggtgtcagatgtaaagatccactaggaattacattataagtggaatgaacaaaggagcaaagaccctgagacaggtttagttaacaaaaaagaagagtagtgtggctgagtagtgaacatccttattttggaaatgaggtcagaaagatgaagatggtcagatcatgtgaggctttaaaggctataaggaagctggattttattctagttacaatgagaatctgtttggatttttggtagggtgagggtagggtgaatttttggtagagtgagaatctgtttgaatttttggtagggtggattcgacataattgaattcatgctttggaaaaatcatttgcgctgttttgtggggattgggtagggaggaagagttgaggcaggaaagctgctgaagtagttgctgcagtggtccagggaaagtggcttaaactagggttgtagctgtagacactgtgagaagtggtaagactcagaatatgatttgggtaggcaaagtatagtggagatgttggtgctctgtccatatccctttgcatgcactgtttcagtgtgtgctgacggcttcctactgccaggccagaatgctagggaattgataccctaggagccatccttagccaaagtcaaccctaggagccgtccttagctaaagtcagatgggagttggaggaggaacattccagcttcctctcctcttgggtggagaacaactccaattcatgttctacaccatctctcaaaggtcccagcgggcccccatcagtaacctgctcatcctcacactttgtacttggtttccttccttcctttctccttttcctacctccacatgagtgcctcctaggatcacctcctaaagaagaaacttacactctaattcctgacccaacatcagcttctagggaaatgcaatctgaaacactaattttagtgaattctaagtaattaattagcaggggctaaaatgaggacctataatagttagtggtttgggattatttgatttgttagacatactacaagaagacaaaactgcatttccacttcaaattcattcttttatctacttccaaggttctgcttatgaatcttcttaggataaattatcttgaccattttcagcaaattcacttttgtcaaaccaggaaaaagtgatttctagaaagaggtggcatttctctagcatctctttgccatgttaggggatgtctgccatggcagtagagctctctggagtttagttgtgatctatgatcactaggctcttaataaaatcttgttaaactattgttaccaggatttgggttaaaggttcagacataatgactaaccatcatggtttgcctgggactagtgttttcctggcttggaaattcattgttaaaactggctagtctcaagcaaaccaggattgttggacaccctgtcagagtttaggccctggggtaagaaatatttgagttttaattcctgaattgtcatttattgacttggtgattatagtcaaattgattaacatttctgtgtcctcattgcttatctgtagagttaatgccagtaccaaatctataaatctgttgtgaagattaaatgaggctatccacatgtggtaggcagaataatgccctccccccaggaaagatgtccatgttctagtcttcataacctgtgaatatgctgttacatagcaagggggaattaaggttgcaggtggaattacggtttctcatcagctgaccttgagatagggatattgtcctagattagtcaagtgagcccaatgtaatcacaagtgttctttaaagtaaaaaagggaggcagaagagatcagagtgacacagtgtgtgaagaactcaaccagccattgttagttttgaagacagaggacggggccactagccaaggcatgtgggcagcatctagaagctagaaaggtcaaggaaatggattaccctctagaggttccagaaagaaatgtagcccttctgataccttcagtttaaccccatgaaacacattttagacttctcatttccagaactgtaagataataaatttgtgccctttaaagtcactacgtgtgtgataatgttttacagcagctatagaaaactcaacatataaagcattaaacacattatctgacatatagtgttcatgtaatactgttagctaactcagctccagtgttgaaactcacacaaagcctttgacttttctgcattctgataggtgggacatggaaaacggagccatcctcttctacactagccattcattaacacaattcttaataattaactcctaaataaaaaatcgttttggatacctcaggctagatacattatcttgttcttttgaacccgtaggcattgtgtgcatatctatgatgatacttgttttaccttgtttctagctatttgtgattttacttaactctcttagtttagaaacaagttgaacatgaaaacaatttttactaacttttctattctcaggatgttatcaatttgcataaagtagccaatgtacattaaatattattaagtaataagtatgggaaaagaggaagtgaaagcaagcagttttctgatgtgacctagaaattgcacagttgtgtccactctcatgccactggcaaaacttggtttgcaagagaaacagagggaaatttgtctctagttaatgtagttttgtgcttacctaaaattttgggaaaaaagagaggactgaatgttgaagaacaatgagcactttctctgtttaatggttttaagaataatttgagccaattagaagttatctataattaattatgagtttagaaagctataagggaagaaagtgccccaaaggtatggtgaactagaaatgtaaataaattctcatcctgaaaggcttcttgaattatttttatatatatatatatatatatatatatatatatatatatatatatatacacatacacacacacacacacatacatatatatgtatgtatatgtgtgtgtatatgtatgtatgtaggtaggtaggtataggtatagataaagagatagagatagatgatggacattcctctgcactcaacttgtaccacatagaatctctaaagtttgaacaatactattcacaactttttattttgtcacctaagaggccaagataactttttagggcacatctttaacagttattaatgttgaaatggttaattctacagtgtactgtgaattgaaactgagaaagtaaaatcaatatggtccaaaagaatgttacctaacacattttactattttctgagattgctggtgttttggcagtgactggctgtgggcaaggataacatgcaacattagatggaaatatagttgtggaattttaataaactgttggtctgccaattatttgcttttattcaaaccgtttttaaatttggcagttattcataaatctcagtccagaaaaactgtcaacttttcttaggaagatgtatatagtagtaagagaataaagaaaagacagaccttcacatattccagaaagagattttatttttgccccaacctactgaatttgtacttccagagtttgccatagtactttagaacccaaagttacaattagaggaataataggaactaacagagtcatgtccgaatagtaagtttcaaatagtacattttaggtgattgttactatttcttggaatactaaatagttctgatgagtacaatactcatttccttccatatttgagtattattttcatacaaatgcaaaaatgaaagaagaaaagcctcgcttcaaatgcacaagttccttaaatttctgaatatatcattttatcctgcttgttgataaaattccacagtattgaagagctgggaatttttagaattcacagggactatgcataatatttggtaatggcttgatgtgcttcatgacatatattatctttctccttctgctcaagatctacttggcataattattttcctgacttctgcctcaggcaatcaagtctaatggggacatttttggccttttgctaagttaccagtgctagtgtcaaagaactattgtccttcccccctttctttcaccctttgaatctgagtccaaaataaatgaatggtaacaagttctcttcactgctttttagtgtaaagtttcagttcagggaaagttctgttcaacaatgaattccagcagtgttcctaatgccagcaggcagcataaaggtctcggagtgtggaagtaagccagaataaattcttctcaatttgagtgaagtcatttatatatgataacatatgattatgattcttaatgcaaacttcatggccatcttaagagcttaaatgatcagtatttatagacagcaaacttaggggtgaaatcatcttactgtgttttttatcccaataagatattattcatatacaaaacatggaagaaggtcctaagagatagagagttctttggttgtagcacagtggttggacttctgaggtggtcagggtgaaagattttagagtggttatatggacagagcagtgagggagggagggagggagagagagagagagagatccagagagcacacaaacataggcattcatgcacatgcaagtgtacaacctccctcggggcttctccctcagaggtgaagggcagtgctgaggacccatctggaaagagttttgtttctcttcctcggagatgatggggacttcctgaaagccttggccttacccatgtgcaactaggctgtatgatcctccctacagcagggaggttccgtctgctcagagtcatgctccttgggtatccttctgtattatctcttctattagatgtgtatgtgtcttaagagggaagaaccattttatattttattgattcttcctacactcactcttcatcttccaatgccttctccacactacagccagagtgatctgctgagtagtatctgattatgtcacatccttacttaaaccgcctcaatggctgagtagtactcttaggataaaaaccagcattttttttaatactttaagttctggggtacatgtgcagaacgtgcaggtttgttacataggtatacacatgccatggtggtttgctacacccatcaacccgtcatctgctttaggtatttctcctaatgctctccctccgctagctccccaccttctggcaggctccggtgtgtgatgttcccctccctgtgtccatgtgttatcactgttcaactcccacttatgagtgagaacatgcggtgtttggttttctattcctgtgttagtttgcggagaatggtggtttccagcttcatccgtgtccctgcaaaggacatgaagccatccttttttatggctgcatattattccatgatgtatatgtgccacattttcttaatccagtctatcattgatgggcatttgagttggttccaagtctttgctattgagaatagtgctgcaataaacatacgagtccatgtgtctttatagtagaatgatttgtaatcctttgggtatatacccaataatgggattgctgggtcaaatggtatttctgtttctcgatccttgaggaatcgccacactgtcttccacaatggtagaactaatttacacttccaccaacagtataaaagtattcctatttctccacatcctctccagcatctgttgtttcctgactttttaatgatcgccattctagctggcgtgaggtggtatctcattgtggttttgatttgcatttctctaatgaccagtgatgatgagctttttttcatatgtttgttggctgcataaatgtcttcttttgagaagtgtctgttcatatcctttgcacactttttgatggggttgtttgtttttttcttgtaaatttgtttaatttaagttccttgtagattctggatattagccctttgtcagatggatagattgcaaacattttctctcattttgtaggttgcctattcactctgatgatagtttctttggctgtgcatagttctttagtttaattagatcctatttgtctattttagcttttgttgcaattgcttttggtgttttagtcatgaagtctttgcccatgcctatgtcctgaatggtattgcctaggttttcttctagggttttttatggttttaggtattatgtttaagtctttaatccatcttgaattaatttttgtataaggtgtaaggaaggggtccagttgcagttttctgcatatggctagccagtttacccaacaccatttattaaatagggaatcctgtctccatttcttgtttttgtcaggtttgtcaaagatcagatgattgtagatgtgtggtattatttccgaggcctctgttctgttccactggtctatatatatctgttttggtacctgtaccatgcaaaatcagcattcttttatctcatccaattcgtccaatgtgctctctctttctcttctctggccacagttacatctttcttttctgcctttagtacaagttccttcctgccttggcttctttttatgctatttgctttgcttgaatttctctttacctccacccctcccctcaactttaccctctttatctcgctacctccttctcgtctttctctttttcaactcaaaagtcacttccttcaggaagacttcttgaatttttatacaaagttaggccccttctgcccccttacacactcttcttgcactctgcaatccccatttgcagcacttaatacaattgtagatatttaataccctttcccctggttagattgtaagctcaatgatgacactaaatatgtctgttaattactgtatgtcaagtacatagtgtagttgaggaaaaggcatctacaacatctggcatgttgtagatgatcggtatatatatttcttcaatgaataaatgaagcaagcaaatgaccaactggatggctgaatggctaacatgatttctttttccacttccccttcccccaacaactcagggcaggaaagcaagagacaggtgacgataggggtaggggagggctggttggggaaggatgctggtaggccctattcttaaaaagcagttacaattcagaagggccatagataaaatagcaaaaaccatatcctgaagaatgaagactttggatcagaatggtgagccagtcctgtaatgattgcctagggacagaaacaaagagccaaatatcctgcaataagaaacagtgggggcccggtgcggtggctcatgcctgtaatcccagcactttgggaggccaaggtgggcagatcacaaggtcaggagatcgagaccatcctggctaatatggtgaaaccccgtctgtactaaaaatacaaaaaaactagccgggcatggtggcaggcgcccgtagtcccagctactcaggaggctgaggcaggagaatgaggtggagcctgcagtgaaccgaggttgcaccactgcactccagcctgggcgacagagcaagactccgtctcaaaaaaaaaaaaaaagaaagaaaaaaacagaaacagtgggtcagaggaggggaaacgaaggtctccttagtagttccagatacgaagtgtcaaagactggggaagcttctttgagcgccactcacattttcatgagcaaaatattcatttaaaggaatcagtctaggttgcaaagtatttagcccacttttcaaatacctttgcatatctgaaatttttagtcacatgagtttgaaattcagatttttttggattttagacaggagatagagtgccatcccagaatgcatttaccgtgaataaactaccatccccagtgggttctgaggcagcatttattatcaaacacattagtagccatgtagtgaaacattgaatatttacagtgtgtgggatgtgtaaactatcaatagcctcacatcatttcaggtcaggttttgctgccaaatgagataccaaaatgctttttgcttagaagagcttttggggtttggaaattctggttgggggattgtggcactggtacaaagcactgtgtgcttctggtgccctgttaattcttgtttgactgattcccagcacagaggaggagctgccctggttgactgactcaggggttcctcagttcttcagggaaatccccagagtccccccagccctcatctgcctagaatgaaactctgctaccccttgccttttccttaggctactgtgagatggttgtcattctactatctttattaaatatttgctgtgttcagttgggaaatacaaagataagcagaagctgagctgtttaggtttatcctcctttaggtaatccatctctatcctagatatctcacttgagctccatgacttttttccagctgcctagtacacagatccacttaacattcaaaatcaaaactggtcatctccttcaacctagaatcaaacaaaaacaaaatctgctgtttatcctgtagtccttgtcactccactaaatggtccaaattagaatcaaactttcctttttttttttttctttttgcacataacctgcgctaaatcctgttgggtctcccacataagtgtcctcccttctctcccatcctctcccatcccagtagcatcttagctggtttgatctcccaaggctcctccctgccccttatttaatactctctgtcatctatccatttctttcttgaagaccttagttatttttcagtaataaagattttaaaacatattgttgctttaaaagttctcactattaaagaaaaggttagtttcctgaaacaaaaaataaaataaagactcaggaactgttccagattgaaggagacaaaagaagcaagaaagtgaaatgcaatacatggtcctggattaggtcctatacaagaaaaacaattgacatagtatacagatcactattaaggcaattgacaaaattggaatagataaaattattacatcagtgttaatgtcctgagtttgataattataccgtagctatagagtatccttttttttgtttttgtttttttgagttggagtttcgctcttgttgcccaggctggagtgcaatggcgtaatcttggctcactgaaatctctgcctcccaggttcaagcgattctcctgctttagccccctgagtagctgggattacagtgtagcatgtgccaccacagccagctaatttttgtatttttagtagagacagcgtttcactatgttggtcaggctggtcttgaactcctgacctcaggtgatccacccacttcagcctcccaaagtgctgggattacaagtgtgagccaccgtgcctggcatagagtatctttatttctgtaacatatacactgaattattaagagataaagggattaatgtgtgaacccattctcaactagtttagaaaaaaatgtatgtatgtacatgtgagtatgtgtatgtgtgtatagatacacatacacatccatatcagtatataaatgatatatgcatatatatgtaaaaagagaacaataaatatggcaagagagtaatgattggtaaatctggataaaaactacaaagaagttctttgtactattcttgcaacctttctataagtttaaaattatttcaacatagaaacttttaaaaactcaatttttagatattgaacttatgtaactgttatccaaacaacagactttattataacatacatacacacacaggtacatacacatacaatttcataaacttcccactgcccataaaaagaaattttaagctcataaacattatgctcagggagtttctacaatcaggtctcatcctaattttcctgcctcactttttgctttctctaaggcactccttactctatatatgctgaaatgattatgtttgtttctccttctgtgtttttgttcctgctgtttgctctataaggtaagccctcccagctcttccactggttacctcctatgcctgctttgagaccaagttcaaatgttgcttctataatacccttctctacagcactaggcagatacaactcttccctctttttgtgaactgaatgttgtgttcccccaaaatttatatgttgaagccataactctcaatgtgatactctttagagatggggcctttgggaggaattagggttagatgaagttatgggggcaggaccctaatgatgggatttgtgccctaagagctctctttgccttgggaagatacaacaagaaggctgccatctacaagccagaaagggagccctccccaggagccaaattgactagcaccttgatcttggacttcccagcatccagaactgtgagaaaatacaaaaaacatttctgttttttaatctattcagtctatgttattttgttagggcagcatgagcagactaatatacctcctctgtgtattcatacaactttacacagaggtaaaatatagcagttagaactctatcttatattgggttgttgatgaatctttcacacaggcatgtgagtcctgaggacagcagctatgtgtttcatctttctgtccctaactcactgcctgacccatggagaccttaagtccaggcttgctgaatgaatatggcataatctgaacctgaccactccaatcattcattaaccttactgtttgggtgtggattgatcattacttttcttgaatttgtgacaagataatttcagcagttgacagacagctagtttctagtcaagccgatgcattgtatatgctcctacttgcctgttcctatgtcttcagtgatggattcagtgacctgaagagtgtatcttaataaagaattttgaatgcatttggttgaaaacattctgaaaagaaccttttcttcatacattttatatggatatgaactagacaataatgtatgcttataataattgagaagtttttaaaaatgagatgctgttactaataaattatgattaattctttctctaaaggtagtacgaagttaaacaatggtaggaatcttggtctctgtttattatccttactccaactcatctttcattacaaataatttttttatacagtcccctctctaccctcttacacagaggcatttcagcagatattttattgaaaacaaaacactgtgcagcccatgctgcacaaggaaagaagtgtgtacaagataattccaaagggcaatacatgtttctagttaaaaattggagggtcatgtaaatatgaactgtttagtcaagttcaggtaaaattaggaggaattactggaaaagcgtgaacagtgaatatattccttagttctaattctttcaatagtcatctctatcaactcagagattgcttttgcttgttttctttgttttttatttcattctgtacagggccttgaacattcagtgacaatttatggtaactgcagagtataccatcaccatcctgtgttctttggataaccagctggcctaattttgaatgtcctgaaccacatattactatagctctgtgttaactatgtcatggagtggatttatttctcctgttgactattagacaacctggttgcttccacttactatttattcaactaatactgcctgttatattgtatgttgtaagagttggaggcaagttgtttcctggtaagcattagactcagaaattctgggagtgtttttgttttgtttttaagctcggcttcaatcttgtaagagatttgtaaatctcgtaaatgtataaggtaacatagaacttgatgtgaccttgtttactcttagatattttgatatgagctgtttagacagaaaatatttgttgataaatatgaatgaaaacataaggaatattgaacaggaggttaaatgtcaaagtattatgacgatggcctggcatagtaggtggaatgagggctttttaatgagaaagatcagtgcccacattcttgttttgtgacttactagctatatttttaaagcaatttacataaactcttgagcctcaagtataccttctataaaatggtgataataacacccatcttttgttgcatttttttgttttttggggttttttttgagatggagtctcactctgtcacccaggctggagtgcagtggcatgatctcggctcactgcaagctccgcctcccgggttcatgccattctcctgcctcagcctcccaagtagctgggactacaggcgcccaccaccatgcccagctaattttttgtgctgggattacaggtgtgagccacagtgcccggccttgttgcattcttttgaaaatgaataaaaacggtatataaattatgagttaccgtgccttgagcataatagatactcataatagatattctaataaatagtggctcttatggttaatgttttttaaatcaagaggacaaataagatcaattaaaatttctaattgattattacttttactaaaagtttttattttgtttagaacagccattagtaaattgaacttattatctcatgatgtttttatgaggagcaaattaaagaaaattagaatcatctgttgtgctagatgacacatagcactcaatgtgctcattttattcccccctcatcctgtatacacacaactctactttttaggtggatttcttccaagatggtctagaaaataattttttaaaacttagtcattatatatttggaatacacatacatacatacatacatacatacatacacaccactctaaaatgaagaaggtcaattgcctattatctattgtctagcatgggttctattattgctcctttatatgtttaactatgatggtattaacttttgttcatatatggatgaggatagtatttatgtattagtagatatatctgtttttagttatacatgaattattcatctttgcttatattaacccaaatataaaaataacacaatagttattgtctgtttgtgctgctacaacaaaatatctgagactaggtaatttataaagagcagatacttatttctaacagttctgaaggctgggaagtccaagatcaaggcactagcaggttgattgtccagtgaagacgtggccttgaaccgcaagatggttcaagatggtgccttgaacaccatgttctcctgaagggaggaatgctgtgtcttcatatggcagaaggcagaaggacaaaaagggagcaaactccctctatcaagcccttttataagggcacctaatccaattcatgagggcaaagtcctcatgactcaatcacttctcaaagccctcatcttccagtactgttgtattgaggattaagtttccatataaattttggaaagaaaaaaaaaagaagcatttaaaccatagcagtcatgcacataaggaacattcaaaattttgccaactattagagtttactgaatatttattgtggccaggttttctgctaggcacctcacatatataatcttatttaatccctacaaattcttacaggaaattactgttttacagttgaggaagccacaggtcaaagtctggatcctatgacttgtaggtaactttggaaccctacattctttatttgttccccctatttctcatctcttttacttagtcctttttttctcagtctctacatgtggaagggtgtggccgtggtcctctgcttttctctgtgtatgctccctccttaggttgttgaacctaatcaattgatttttaaatatactgataaatcctgggtaggcaaaataattcttttttttttcagttgctggtgatatcttctgcttatccagccattcacgataatctccatccagatgcctaacaggttttcaactcttactatgtccttcttgacatcttcccctgtaaccactcactgtactcctactccagttttcctcatcttggtccacggctccacaattcattcagttcaggaaaaaaaccaaggagtcatccttcatttccctctttttcctttttttctatgttcagtctaccaacaactccttttggctctgtcttcaaagtatatcccaaatctacacacttttcagcatatttatcatgtccaccctagtatatgccaccatcaaatctcacctggtctacagcaagactcatatccctggttccactgatcctcctcatagtctcctctctgcatacagacagagcaagctttctaaacataaaatgagaacatgtaattttctttttcaaaggcccttcctaatggtttcccattacacttataatgaatcagaatgtcttgtgtggccacagggtctctgggccctgccttgcctgtgtgtccagcctcaacttgtttcctaatatctggctaggtgtgctctgaccattctgccttcttgctgcgcttccagtgtgccatgctcctcctcatctcagctcttcacacatgctgcacttctgtctgaaatgtacttcctcagacttttgtatggcttgctctcacatcattcatattttgctcaaatgccacctcttcaaaggctgtctttgaccaacatatctaaaacagcacccacagctttgcccaaggtcctaggaacaccttgtccttctttagttttttttacagcatttgtcacaatccaaagctatatcctctttatatacatgtttgttttcatatcgcctttctctcccaccagaatataagcatcctgagggcaggaagatgaaccacctatttcacttctgtatctctaatgcccagaacaatcagtgaaatatagtagaaataaagaataacacaaggaaagaaagaaaatgagttgtttccagttctgattctgtttgattccaccaggctatgctgactcttcattgtgtgtaacgttttgcttgtaacaacaaaaaattggcagcaacctacatgtcttcaatagaggactattaataaatcatgaagcctacatataatagaataaaatgcaccaataaaaaagaatgaagaggatcaagatgtactagctctgaaataaagtgaaaaggcctgttgcagaacattgtgctccaacctctgctttcctgctctgggcctttgcacttgcgattccttgtgtatggaatgctcttctccagatctttcaggtctctctcaaatagcacctcccagagaatgttccaaatgtttaaagtatcttttacccttttcattcactaatctcttggcttgctctgttcttctgcatgatagttatcaccatccaaaattacatttacttatatgtaaatgtaaagcagggacttgacagtcttatttgccgctgcattcccagggcctccaacagtgcctggagtaagattgaaaaaaacaatgagaaataaagagagagatatatctggttttccaattaggttcttttgtataagagagtagaagtaccaccatatgctacccctcatctttaaaaactcagtgttaggacctttgtgtttttaggcagatagggaccttagaggtcatctagtccaagctatgattttgcaaaagagtggattgagaagggtgttaggtgatgtgtggaggtccagtgaatatggaagtcagcggtgacaggatgactttttatgctttttgagctttgagttatgtaatgtgctacttaatttaaaaataacctccataaatatattttgaaaaatatcagtgagatggtagccagttaaataattcagacacaagcactcaagggtttagaggaagataagttacttttaagtcactgtggacacagtcattgatcagagcaggcttcctgaaggaggacatcagctggcccttgaagaacagaagggatttaatggtgaggaagcataaggagcatttcaggaaagcattgcagcagtgagcagttggtggaagaggtccaggtataggagggagaccttgaaggagaaacctataagggcttaagaagaaattaatggttacccataatatacttagctctggaaataggaactggaacatcagtctgtaaatccttagggcctgtaatggaaagacttattttctcaaaaaatattgttttaaagatattattattttctctatagacagataatataagtgaaacagtagttacacattgttatggattgagttgcgtaaaatatatatatttttatttttatttctatatataaatatgtagaccctgggaatgcagtaggagataagactgccaagtccctgccttacatttacatataagtaaatgtaatttgggatggtgataactaccatgcagaaaaatagagcaaggcaagagattaatgagtgagggatacaaatatatatgtatatagaagtcttctctagtacctcagaatgtgatcttagttggtgatacagtcactgcagatataattacttaagatgaagtcacactggagagatgggcctctaatccaatatgactggtatccttataagaagatcccatgtaaagacagagctaaacaggaagaacgccatgtaaagattcaggctgctattggagttatgctccttaagccaaggaatgcctgggtctatcagaagctgaaagaggcaaggaaggaacatcccctgtaggcttcagaaggagcatggccctgccaataccttgaattctaacttttagcttccagaactgtgagacaataaattcctgttattttaagccatgcagtttatgatattttattatggcagccttaggaaactaatacagaaactctgcttttacaacacaattttgaaatgaagccaaacagaagaaaaccatcacttgctttgtaactgggtttatggaacatttggtaaatttgattagaactttgtttttgttgatttagtaataatgattggttacataatacctataaatgcaagcatcattaaattctttttgcataagtcctttataaattaattgcaagcatagctggagtaactccagccacaaactaagtgaatcaccattagagtcacacatagatcttttgttttcatttttgtatcttaaaagctcagtcttcaacaggcattctttttctcttattttagttacagcattaattcctatgtatgtttaatcacatgattaacaatcattgggtgaatcggttcatataagaataaagaacagattttaacttttttggttttaagttcatgaacatgcctatcatattgtcatttattatgcctatttaaatgtaacaagagttttaggactcactatgccaataatcttgctaacttatgtcctgaatcagaaagaaaattcatagagaaatgaattatatgtaaacttaaaccacctaggcagatagctgttttctgttgttttcagagagaaaaccaacttacatcaggtttacattttacttatctttgttttcaagcctctcagccactgccttgatggcttcctttcccccatttttttttctgtcagtgctgtctcttatattaaaccaatatctaatattttgtcttttgcttttctggtccatgtgctttcacaataaggataagagattttgctttgttatcatatggcaggactataaatagagaaaatcatatttttaaaaatcatttctagtatggtttgcaacatgtttaaattgattgctcccccttcctttactcagcctcagacttaattcttaattaactgtttttcttttttcttctacttgagggtcatgggaaaaagtttgaggttagtcacatcatatgggttttaacctttatagttatcttgtaacccaaacaaacattagtcattctgataaagggttagaagaatagtttggacatctcataggactttggctcagataagttattccattaatatattttctcaagaaaatgtcttcatttttgctttcctgacttctggtctcctgtaagttttctaagtttcatctggctctaaaatgctttaaaataatgctctggactaaatatatttggggaaatggtcagatttgctttattcatcagatagtgttattttgagggaaattattacatattaaattatgtcaaagatttattttatagtttcttttacatttttccttagccattgcttacttattcatgatataagtggagaccagtagataacccattatgtgaacattctagaaaggtgtttaaggagttggctggagctacaagcaaagtgagtttctttagccttttaacttatccacgctctcagggatgctaaataaaagctccatttagcaatatttgcttctgatgtgtggcaccagcaagagctacattcaggtacaggaatctgtgtccagaggtaggctctgaacccattgttttaccatctgtcttccagccccagagtgaaattcttgtaggaggaagttgagtggggagaaatgggggaagtcctgggcctgattcacctcctaactcttagggttgcttgggcagcttcctccatctctctagaaatcagtttcttcatcagtacaatgaaggaatagccactaacacttactgaacattatgtgccaggcactgctccaagtactttgcatgtaaaatttgttaaatcttcagaactctgtgagggtgaaaaatcaatacacacatactctctcaattctctctgtcctgcttttccctcctattgtctcatcaccttctgagatatatatatatatatatattcttttgtatgctttatatttttgttattttgtcagtctccttgctttagaatgtaaatgtcataagggcaggaatttccatttgtttcatttactagggtatacctctaaaacagagcctggcaagcaataattacaaaatcgatgttgaatgaatgaagtacatagattaagtaatttattaatgttcaccaagatagtagtggggcagagttgggaattggtcccaggttgtttatctccagatcccatactctaaagcaccgtgttatactgactaaaattaggcaaccaatggcttccaagccatggttcatcatgcttgtttcacatgagaatcgtatgtgatgttttaaaagctacaaatgcgggctgggcacggtggctcacgcctgtaatcccagcactttgggaggacgaggcaggcagatgaagaggtcaggagttcgagaccagcctgaccaacatggtgaaaccccatctatactaaaaatacaaaaattagtgatgcatgcctgtaatcccagctactcaggaagctgaggcagtagaattgcttgtacccgggaggcagaggttgcagtcagcaaagatcgcaccactgcactccagcctgggtgacagaacaagattctgtctaaaaaaaaactacagatgcctgctgcttcctactcttccccattacatactctgaaggaatttagtgagtttggagtcacaatattttgtcctaaaattcccaagtgaacttagtttgcatctaaactgagataaacttcaaaaacatagcttaagtttatctcaataacacctttaattttataaatctttaaaatgtattctaaaaggagttcagattgaaccttttgtttaaaggggcagatggaagatagtaggagcagagcttccttctgacattgattcatggttgggtttatggttgagttcatggatctttctataatgattttccagctgattctaaatgttaagtaggactggcctgtgactgatatctacagaccttactatagactggcagtaaactcataataatctatatgatttaaaatcagttgtttaaccacagtataatttcaagactatacttccctttcagacattggtatttaacaagtggatagtctaaacctaccctgggactggaccttgggagctagttccagttttcaattaatgaaccacattatactagatgaataagatttaaataattttgtcaaagcgttatcccctcaactcatgaaataacctttactaggacaataatgggacttggtgcggaatgacctgaaatgacagctagtccagaaagattggtatttggttgtgctgtagatgacttccttatcctgaaactaattacagaaaggaagatatttaacaaatgccttggaaattgattaagcttcttcttctttttgcttatttcttcttctactactactactactactattattattattattattattattactgctactactactacttttaatgtgctgtgcaggtaccttagctcatttactactagaaattttgtgagcttatgttagcctggattatccaagaagcagatgctgattcagcattaaatgtgcaagaaatttagtagggtaaattcctgtgagaaaaaaaatgtgaagggatcccagagaggctggaagagcccttaatgcaagtctgaccctgaggaaaagatagaaagagaaggggaagaatggtgtaagcatttcagactgctgttcagttccatgaaaacttagcaaggctgttggggaatcctcaagccaaagccaactattagaggagtcactcatctcatgggattgggcctgcctttgtatttctgttgtacagtcattggccgggagcagcctgtgggagaatgtggacctcagtggatttcagaacagagcagctggggctttcagccaattctgccccctgcagtcaaaatctaggaggcatattgttatggccaatattctcatatttagacatgatgttctagagattccgggaagttactcttggatatgtgtccaagatgtgtcctttccagaataatttctctttacacattctttaacctggttattatcagtcttgtgctgaactctctaacccatgtggataatttttagtaaggatgcttagtaatttaaaaacataaaatccatgctgctagtctctaaatcttctacgaaaagtttaatgctaaacaaaaggggtgtgtgtgttgtttgtatcatgtatatgtacatacaaatacacacatacacatagtattgagaaacataaacttattcaactggttattatagaccatgaaaggaattgtattgccgtatctaaacaaagtgtgcaattgtttgggtttatgtactctgtgcttatgagtgttgtgaatttgtcacttgggctttcacctcagaacaagtccttttttatttctacctcttgaaataatagttgttcactcaaagctcagaggtggtagaaactggtagcagatatcaggaaaacaagaataattgtcatttactattattggtcagtttggttctttattatttccttggaaattatacacaatcagaacaactacttgagggttttttaaacctcaaatagtataaaaatagcattttatcctaatcaaagcaagttttattcagtgtttttctatgatcgaacaaggagtggacaaatatatattgagcacttgctgtatgacatgctgaggcattcgacattcatgatttcatttcttgtagcattataattattatgcttcacaacaagccaatgggctaggtgtcattatgcacatttgaaaagtaggggccagtcgtggtggctcacccctgtaatcccaacactttgggaggccaaggcaggcagatcacaaggtcaagagatcgagaccatcctggctaacacagtgaaaccccgtctctactaaaaatacaaaaaattaaccaggcatagtggtgggtgcctgtagtcccagctacttgggaggctgaggcaggagaatggcatgaacccgggccaagcttgcagtgagccgagatgcaccactgcgctccaggctgggcaacagagtgagattccatctcaaaagaaaaaaaaaaaagaaagagaagaagactgaaaaagcaaaactaaaactaacttgccccatggctctcaactagtaagtggcaaaactagcaactttacaactatctgactgatatcaaagctccagtttgtgtttctcagctatacgtgtctttttaaaaatgaaggaaattaaatttcagcatcaaattacctggctaatttagaaatgaagggttaaaagtaaatagaaaatgagaaatttaaaaatattttttggaaggaaatacccaaagagtaaagtgaattaaatcagcttcttttctacttgcttattaataacaataataatgctaacgtatcctacaaagcacatagcagaaatgtctaagaaaactgtgtacctagtaaatatgtattaacatgtttacatatgatttaaagatgactaaaatagaggacagaatgcccaaaacgctctttttctgtttaggatgaaaccattgaaaaaaatgcttcagtagtctcttctagaaattgaggggaataggctaggtcatctctaaactctcttcagttctaagattctttattctttctttactttttctaagcactttgacatagtactatccatttattttcaagatgttcattgaaaaataaatattatagggaatagatgaataaacatggctaattacttagaggatttctcacagattagttaacatacacccttgtattagtcagagtagataggttatgctgtagtaacaaaccaacctttaatgctcagtgatataagacaaccaaagcttatttttagctaattatacatatttactgtaagcacgggaactctgtttttgtagttattcagggacacatgctaacaagtgtatatagccaagctattcaagtttaccaattattgtgctatagggaatgaggaaatatggtgaatctaacactggcccttgaagcctctgcttacattccattgaccaaagcaaatcacatggtcacatctcacatggaaagaagaggcagggaagtacaacttagaagaggtctgaagtgaacgtatttgttgaaaaaccctaatggatgtcataaaactaatacaatgtgaaatgagaatctggtcatatcctggtcttacttaaaatcctacactgtagtgccttattatggcctttggggtaaatatgtatctttgacatggcccttgaggctctgttgatctgacactcaccttcaaaacttcatcttttgattcttcccttttcgctttcttcactgcagtcatgttggtcaactcatccaacatgttgttttcataaatatgttcttctccctcctgtttacacatctttgcacttctgttcagtctacccactattctataagctgaatcctacccccaccttcacaactcagtttaaacaggactaactcttggtaactgtccctgactttctaggaaaagatccccttttatgtgttctcatagcacctgatgcattttctcaggatataagctgtgtctgtttaactcaccaaccacagcacaatacccagcacataatcaaacactgaaatgtttgttggccaaatatgggttttagattagtgcccaaagattacattaccagatttcacagaaagaatagacagctttaccagcagagctgttaggaaagggaccaataccaggattgcttatataagaggatgcgtagccagatgcctcctaggtatatattttattgcaaaggttactctcaacatcagaatgtgttcctgcttagttctacttgtgggactttctgaatcttgttttctcctttggtaaaaatgagattttctggcaagaatatgtcaatttttttttatcctccttcaagagtctaggatgtatttctagataaagaacttattagatactagataagtcagaaaatataaactatgctttggagagaacaaaacaaaggagagaacagtgcaggttggggcaggtgaaggagtcctcctttagggaaggaggtgtattagtttgcttgcgctgccataacaaaataccatagactcagtgaattaaacaacaaaaatttattttctcacatctggaggctggaagtcaagatcaaggtaccagcagcattggtttcctctcctttgcttgaggtggccactctattgctgcctcttcacatggccttttctctgtgcatgcacatccctgatgtctctttcctgtgttccaattttctgttcttataaggacaccagtgatattggattagggtctaccctaacgacctaattttaacttaattacctctttagaggccctatatccaactacacttaaacattctaaggtactagggcttagcatttcaatatatgtattttaaggaatacacaactgagctcctaacagaaggcaaagaaggagtgtactaaggcgatggagagattgagatagagctgacatgctgcacatgtcagcaggcttgcttgtgctatgtgagattgttgaatgggtcactgaaacatgacttccttagaaaagcagttctgcaactcttctgtctctgctccatcttcctggtattgcttcccaggtcacactttcaaatactcatttaaaaaaacctacttatttatttacttatttgtttatttatttattttagagacaaggtctcaccctgttgcccaggctggagtgcagttgtgtaagcatagctcactgcagtcttgaacacctgtgctcaagtgatcctcctcttgagtagctgggactaaaggtgtgtgccaccatgtgtagctaatttttcatttttttttttttttggtagggatgggggtcttgctatcttggccaggctgttctaaaactcctggcctcatgcagtcctcttgcctcagcctcccaaagcaccgagatttgacaagcatgagctactgcacccagcccacaaaaactcttcttatatttacagttcctggccaggcacagtggctcatgcctgtaatcccagcactttgggaggccgagcaggtggatcacgagttcaggcattggagaccagcccagcaaacatagtgaaaccccgtctctactaaaaatagaaaaaattagccggcgcctgtaattccagctactcgggaggctgaggcaggagaatcgattgaacccgggaggtggaagttgcagtgagccgagatcgcgccaccgcactccagcccgggtggacagtgtgagactccatctcaaaataaataaacaaacaaatatttacagttctttaagtagtgtctgccttctcccctatactgtgtcataagggcaggaactttgtcttttttgttcactactgtacgtctagtacctgacaatcaacatgccgcaattttttcacatgatagtgtagcaggacgagccacagacaaaactcctcagacaccgagttaaagaaggaaggggtttgttcggccgggggcatcagcaagactcctgtctcaagagccgagctccccaagtgagcaattcctgtcccttttaaaggctcacaactctaagggggtgcgtgtgagagggacgtgattgattgagcaagcagggggtacgtgactgggagctacatgtactggtaattagatcagaacaaaacaggatagggattttcacagtgcatttctatacaatgtctgtaatctatagataacataaccgattaggtcggggtcgatctttaactaccaggcccagggtgtggcgccgggctgtctgcttgtggatttcatttctgccttttagtttttactttttctttctttggaggcagaaattgggcataagacaatatgaggggtggtctcctcccttaatagaataagtggaatatgatgttaaataaaagagatgaagacctggatgttcccaaaggtctgtaggcctcagccagcctcccagagggagcagagcctctgccactgagtctttagacaaacctttccttccccaccatccccaaaattacttctgcccccccaccccaattaaataagatttacctttgggacctgttgaataaacctggagtgattttttaggtttctgattgccttcttcctaaaatatatcatttcgttgatgcttaaagtaaataaagaaaaagtatttcattcctcaaccagtgataagatttaaatgcaaacctgtgattgaagctgagatttcaatttgttgaaatgtaatcagcccatgtgcatgtgtaaatgactctcaaccaagattttctgtttaaatatggagagaagagagagaagtggcagggtagaagagactgcagaataatgtttcagaagagtaacttcccagatttgacactgcactccatgtagagcaagttggagtgttagtgtagagagcatttttttgcttcctggctgtgggaagtcctcccctaaccacctgcagaaaataatttatccatgcagggagcataagggtcttccagaaaagagagctgatagtggttcacagtattttgcgctttactggtctgtgattatggaatcccagatttgcaacaattgaagtctggttttgttaatgttattctttaagatgtcagtggaaacatttctctcccagttcccttgtaaagtgaaaattacacatcagttgtaagccagcttttaaacagatttctttaaaatatgtatttttttcagttgtagcaatgtcatgtcatttaccttgtaagaaatcctatactgagaaatataagagctgaacatctttcactgtgtttcttcacgactgtactcaatcttattagattcttctactgttaagctaataattaatttggatttctatttttttattgagtagtgagattcacatttgacttgccagaaaaataaaaaacttttcagtggcagcaaggcagataataattacttcttggacattcgtttagcagccaggtgctatagtgtgctttgtctacaaatgtgcttttaaatgttcttatcgaaaagtgtgtccaggaaaaacctttatattattatgatctattttactcattttagttctaagggtaatggaatttcatgtcatttgatttgtaatgaacaacacaaagatttttaaatattctgaagaaagttttgaaaatttaaatctaacagaaaagtaagaaatatgtttaatagcatttcaggtataaaatatacaccaagagaaaaaattaagttggcaataagttatagttaattttgtatatggtttctataaggggaaaacaggtcattagcctgatcatgtgcatctttcctgatacctttcttctcattccctcttccattatcttccctccacttctaccatccttcttcagccaggatatatttttaatggctgatttatccaactcttctctttttttctgggccccctagtcaaacctgccccacatagtcaaaccacaactcattaacaaccctcagaggcaaggtaagaggacaaaagagaaaaggaagtgcccacctgtgagatctgaattcagcagttaataggtccccctcttacccctcaccccaggctccaaaggggctttcttcgtattaacatgtgggaaacacaagtcccaaagctatgtctgctagtaggctttcctgctaatttcaccatcattttattagacttcacttatatcttacttcatcagcttgccattggcaggtgggcagattttcctcagtttttggcctaactccaagatatatacaacagcaggcaagatccaggaaagcaaaggtattttgactatttttcccagtttgctttaatagcttaggacaagtaacctgctggaaggcagcagtttagattattgacaagaatatgagtttggaagtcaaatagtcacaggtgaaatcccaactccacccccttgtagctgtttgaattgactccatgagttttagatcttcatcaacacaaaggacagggaaagcacaattgctttagaataggatagttgcagcgtacgtagctttggaacctacatgagattctgagggttgtgtgcaggggtatatgtaaaatacaaagagagctggctttgttaaacagcaatggtagaacaacccaggtgacccggaagttcattatcccctctcattggtagctcgaggagcctgagttagcttaaggaaagaacaggcttccatttcaactacttctttccattgcattgatgttcactgcacttctctgttccttataatgagtagaatattatagggggagagtttcacccttttggggatgcatgcagtccatttctgcctgtgtgcactctcctatgtctgtgcttttaagttttctctgagtttatcccattttatatttgtactatgaggcactgataaggagtgctaatgactcctttgcataacagttggagattagctagggacacataccacccactctggggttaggtgtgttttgggaagcagcagagtttaactggttcacccagggtggaaacaatcctccttggaaaggctggaaccaggtggctgctaaccccgaatcatgtctggtggcatcataggagtccttcagacaccaaagcctccaaacccacaagtcactgggaaaaggtggattttctgcaaaagaaaaaccctggcgagtgagactcatggttgcctaaattttctaagtcccaagacctcactttcagatgtttcttccccatgtctggggtgaaaccatgcatgatttttgaaaaatgtccaccacaagttgtgatgtgcactccaggatgagtactgcatgatacataatctccaaagttccatcagctctttagttcttgaggtaggtatcatcagaaacatatgagctccttcccttttggattagaggaattgtacaaaatgatttgtttttatcttctatcttgccttcatccccagatttcttgcaactttcatcatttttttaataaaacctaatgtcctgtgttgcaactggagtagtaggtaggtgttctcctgccaagttaagatgtttatacaacgtctgtttgccatactaatgcatgctgtggaattgtcttctgccctccatgtaaggaccacttctaccttctcaaatacataacccatgtatagtttgctatctgacttatagcaagcattcagatattttcctggcctatcactatgtagcaggacgagccacagacaaaactcctcagacaccaagttaaagaaggaaggggtttgttcagccgggggcatcggcaagactcctgtctcaagagccgagctccctgagtgagcaattctcctcccttttaagggctcacaactctaaggggatgcacatgagaggatcgtgatcgagtgagcaagcagggggtatgtgactggggctgcacgcaccagtaattagattggaacaaaacaggacagggattttcacagtgcttttctatacaatgtctgtaatctatagataacataaccgattaggtcaggggtcgatctttaactaccaggcccagggtgtggcgccgggctgtctgcttgtggatttcatttctgccttttagttttatctttttctttctttggaggcagaaattgggcataagacaatatgaggggtggtctcctcccttaattatagtaaccagaagacaggcctcatcctagaggagctcagaggggaggacggcgggagtcctaaggagtcatagcctctagagacgaaaggaaaatctgaggcaagggttcttttcagctttttctttaactcccccaccccccaccaaaaaactttcaaatatcttaggagctgcttatgccaagagtgatgaaattttttggcagttactgtgatatttgtgccagttcacctccttagggtatcttgctgataagatttaaatgatgccaacataatgctgttggaccatttgtctcttttcactgttttgtgcatttatcccatgctgcggcaccaccggcgtcttctgaatggatactgaggcagccaaatcctgactcactacagtcctacactgtgtctctcttgcttggccgagaaaactgttaggttctctcttcatctgtcaaatgtaaggatattaggcactccctgaaacttaactgctgaggtacaaagcatgaatttaggtgaagacttaatggaaagaacagcaaaatgtatcaaaatctctaaataggtgaaatagtatgtaagggcaaaatgaagcagaaaaattactagagagatgagaatgtaaaatatttttcttacttcattctagtagaacaatctataaagagggaatgcctaagttaaaaatataactgtaagtagactcttcaaaatgattaggcaggcagttagattttcatgttgcttcacatttattaaccttcacccattaggctgttgttggggtcatttgtatgatcttcaaatattcaggccttctgtagaagccttctaactcgagcggaaatggatggctttctcctagagggaaattaaggggtccaaagatacttaacagtgcatacagtaaagagagaaaaaacaggaaaaagtcgaggattggaatctccagcttatagagctccattctgctccagaacaaactctgttttattcagttacttagttacacagcacatcagagagactaaactattgacccttgaggtacagaaaagaagtgagccaaagactttacgagattatttcctagcagaaaattaaaataaaatctcactgatttctccatctcttccatcataaggtgaacagtaagtaaaggaagtggagagtttaagggacagcgttaggaaaaacttctgagctcctacatgtgacctggataatcataactttaaccctcaactgcctttccaccacctatgatgttggggtttcagaaaaggtggaattggaggaggatggattttcttgtcaagatcttgggcaaatgatatgctgaaagaaccacagctggagtccaggggttacatagaagtcactggtattacaggatatttggaggtcaaaactttaaagtattatccataatacttgaatccaaactgctcttggtaaatatttctgtttgtttccggtgagcccattatttgtttatgctttctgcctcattggccattctacatattttctagaaaatgttctatgatatattttacctgcctaattttgagggcagttgaaaccattatgtgtgttactacaaaaactgtgttcttacacaagtaaatttagagacacaacagctaaaagtctttcttttagctgttgtggtattttcactacttttagtgtaaattcaggtctgttacttaacatggagcttccgccacagaggccagaggagcacatcaaagccaaaagcacagcaagtcatcggagttcagattcttttctgcttccctgcagaggggtcaagaatataaacatactcaactgctacagcaggagggaacattagcccatcaacagaaccaaacaggaagcaccaaatgggcatttcttctgtttattttgtgattattaagaaagacgtagtttagttccttcaaccaaatttgtcaatgaaacatagaaaacatacaaggtacagtcattttggttaggggagagtctgattgtgaaaggattcaatgctgttttttccagttatttcacttactacaatgtatacaataagttcttagggtgttggaatttaaaactaattaacatttgttacactcttttgagattcacattatgagtcacttagattttaatcaaatttctcatacgtttcctttctggaccgaggagactgtgcacatattgagcagaacaattttgcctcccttcagtttgagatggggtgcgaagagtttcagatacagccaggaaatacctcaaatggcactgcagaggtctgtaagactgaccaaaatttaaaatcttggtatatccattccattacatcaaagtaagttctagtactccactgccagtatcagcagataataaaaaatgacgcacattgtaatgattcaagcaagcccagtaaaggagcaagaaggaatgtaatatctatttttgtgaaagtttccagaaataaatcaacaaaccactttattcttcttataattacttggaatctcttaattccagaagactatctggcctgctgtttaaaaggaagtgagtgttccctttcagcttgcttcactatttttctcatccagtcagtggtatgggataccaaggatgggataaggagagtagttcacccctagtacaggcaataagggctgctttgtgtgtagaaaattgaaaagaaataaaaataaaataataataaaagccagttctgcttactacgcctggcagttccgcttactatgcctggcagttccaagcaatatcaacaatactactcctctttgaaaaataaaaaaacttttgttggtctaagttctaaacaactgctgcagttgctgaaatttaacaaaacaaatgtaagctgaatattacgtttttattattacttattatttaataaacattgcattctatgtggaagtaattctaactctcaaatgcacatggactcagctatacttgtttatttcaagaataagcagtcaagttctgtttcatttttataatcactctgctgtaattgtttatttttagtctgtgtttaaatacaggcttacatagtaccacagggactggagatgtgacctgagcctgaagcaagctcaaataattcacaatcattacaagctttggagaattttaccaaatatgatagaaatttatgatgaattttctggtgaagttattttagtggaaatttttcaacagcagaaatatttgaaaactgctggaactgatcccaaagaaaaaaggatatgggtagtactataatttctggaatttattgtgaaatgggatttgtatgaatctgatgaatgtattcttattttaaagatttcatcactatttccatatctgttatttcacgtgaaactttttgaaattaaaataaaaaatgttcttcaatcaactatgagtgatgtcaacacatctgaccgcactgattttactgaccatgactatataaagattaatttgacaaagcattgacaaatttgcaaaaattaatgctcaaagtcagaaaacataaagtgattattcttcactgaggcaaaccagtatataggtataaatatttttcttttcttttctttgagatggagtcttgctctgtccccaggctggagtgcaatgacgcgatctcagctcaatgcaacctccgccttccggattcaagtgattgtcctgcctcagcctcccgggtagctgggattacaggcgcctaccatcacgcccagctgattttttgtatttttagtagagatggggtttcatcatattggccaggctggccttgaactcccaacctcaggtgatccacctgcctcggcctcccaaagtgctgggattacaggcgtgagccactgcgcctggcccatactaatgtacttaaaaagtattaaaccttaactttttgcattttcagctaaaatatatactttattaatttattattagcatgattacatagtcaaaattgaataaatgaaaactttcactgcctgcatttcttttctggacataattattatttgtttcatttcaaaattattactgaaaatacttttatcatacagaggaaggcgtattaaaaatggtccctttcaggcatcaagtacctagctatgccactgcatgcgtctattcattttaactcaaaacaaaatgcatttttaatctttttggtattacatatgtttttgacaattatgccaaaaagcaatttattttaataagggaactcttaataatcaagaaatagaaagagctacccttaaatacaactctcaactaccaccgattttggtaataactatttctagttaatatatttgatgttttgattattttattataagcttagtaggataagaaaaatacaaaaaatacaactgcataaatctcaacatgatgaaatagaaattatgactatctccttatgactcaaaaaagctgaatcactcattttaaaccttccagtctagcaaataccctgattttatgccttttcagaaaacagaaaaacaaagatgttctccaacctagcttataaagtcaacacaactttgatataagaacatgaacattaaatgatgaggaaaaattgcaggcaacctcaatcatgaacagatatgcttaaattcttaatattagataaccatacaacatgtatatatgaaatgtcacaagttgagtttgttgcaattatgcaatgttagtttaatattagaaaactgagaatttatgacattaacagaataaaggaaaaaattatatgataattgtactagatgcagaaaagcagttggttaaagtaagcatctatttatgattaaaatacatctttgggcaaacgaagaatagaagagagcttctttaatcaaatacagggtatctacaaaacaccaataataaacaccatagaaatactgaaaactttctttctgtgatcaggaataagataatagttgtattagttcattctcttgctgctatgatgaaatacccaagactgggtaatttataaaggaaagagatttaattgactcacagttctgcagggctggggaggcctcatgaaacttacaatcatggtggaagagaaagcaaacacatccttcttcacatggtgacagcaaggagaagtgcactgcgaagtggggaaaagccccttataaaaccatcagatctcatgagaagtcactcactatcatgagaacagcatgggggaaatgcccctatgatctaatcacctcccacgaggtaaccccccaatatatggggattacaattcggattacaattcaagatgaggttctgggcggggacagagccaaaccatatcaatagttaccaacatttctaggctacctgccactgaaagtcctaattagtgtggtaaggaagaagaattgaaaagaacaagtaggccgggcacagtggctcacgcctgtagtcccagcactttgggaggcagaggcaagcagatcacgaagtcagggaatcgagaccatcatggccaacatggtgaaaccctgtctctactaaaaatacaaaaattagctgggcatggtggcacgcacctgtagtcccacctacttgggaggctgaggcagtagaattgtttgaacccgagaggcggaggttgcagtgggccaagatggtatcactgcactccagcctggcaacagagtgagactccatctaaaagaaaaagaacaagtaaaactgccattatttgctaagactatatatataaaaaaactcaaagactctacagatagttcttagaattgagtttaataaaattgtatcccagcaaccttgttaaactcaattctaatctcgacttgtagattttaaaaatttcatttctatgatgagcaacaacagaaaataaaactgaaaataatcataataggatcaaaaatatttaaaacctaaaaataaatattttagcagttgtaaaagaaacataaaacattcccaagagacattaaaaaagacaaatcaatgaatacttgtactacatttatatattggaagactcagcatttttaaaatgttaattttcctgaaactgagctttagatccaaagaaattcaaatcaaaatcccagttggtttgtgtgtgtgtgtgtgtgtaagagagacacagggagaaaaggagtttgaaactcaattctttaaaatatgaaaaaaaaattaagagaaacaggtatagacaagacactcttgaataggagggaaaaggtaagaggagttgctctactggatattaatacttatgtctgtgataattaggatagtacagtattggggtaagaatagacaaaaatcagtggaacaaattggagtttagaaaaaagacacatttgaaataaattaagtgtttatatattaagcaggacacacacaaaaaagtacttacagtaaaggaaaagactgatacttagagttaaaattaagagcctcagtttatgaaaagacacctttaattggtaaaaagtcaagctacatggtaaaatatattacatatgcaagtcttgtgcctggtataaagtacatctacaaagtaaatcaatatataaaaaaatccaatgaaaaatggacaaaaagacttcaggcatttcacaaaaatagataccccaattgccagcaagtataagaaaaggtctttgatttctttagtaatcaggaaaatgcaaattaaaaccacagttatataccatcagacttcctttagaatagctaaacttaagaatcctgataatctcaactgtgggagaaaatatagagcactaggaattcttattcactgctaatgtgaaaattggtaaatgtacttcctcaggataaaattttcaatgaaaacggaatagaatttacatatattcacataaattcatgcatcccagtggaaagcactgacctattttttgtcttgtcttagtccattttctgctgcataacagagtaccatagacttggtgatttataaagaaaagagatttatttggctcatggttctggaggctgggaagtccaaggttgagggaccatatttggtgagggcattcttgttgtatcataacatgatggaaggcatcacatagtgagacaatgtgagagagagtgagagcatgaaacagagaaaaagagggccaaactcctgagataactcacttctgtgataatgacaatccatgaagaaagtgcccccatgacttaatcactttgtaaactccccatctcccaataccgttacattggcaattaattttcaacatgagttttagaggggattttcaaaccatagcatgtctcaactgatctttatggtatgtacatatctactttacagatgagaaaagtgaggcttcagaaagagaaagatttttaataaatccatgaatctactaagtggaagagccaccatctaaacaagctctttctcattctcaaccacatattctttcaccatgtttataaaagcatcctttaaaaatatatcctgtttttccttatacatttataaatttctctttaaatttaaaaatatcactttaattacattacttgatgccttttgctccctactcagaggtaagacaatgcagtttacaaaatattgcaattcttgagtccaggagatcgaggctgcagtgagccatgaatgcaccactccactccggcctgggtgacagagcaagaacccctctcaaaaacaaccctccaaaatattgcaatatgtgaaagaagtttgactctttgctatactgatctctctcctagatgctttattttaatgtattgtacttagtgaacattgtcgtactaatctatttacacatttgtttcccaccattagattataatattcttgaggacaagttcttatctttgtgtctctgtatcttcagcatatcacacaattgtctgttgaatgactagatgagattttattctcaaggctttgactcagagtaggcaagtccccatttcaacccttttaaagaaagcttgaaatcactctgctaccttctagcagagttaaggtcaaatcatattctgaaagataaaggattctaccttatttttccatttgaagtgattcccaaataattctactccctgttggtctcttaattcacgcaaagcccacatttcacaaactatatccagagaattaggctctctttgccaaaaatactgtattcgaaaattttctcccattctgtaggttgtctgctcactcttaatagtttccttgctagatcccatttgttatttattttttttgccttcattgcaattgcttttggcatcttcatcatgaaatctttgcccattcctacgtccagaatggtattgcctaggttatcttccagagtttttatagctttgagttttccatttaagtctttactccatcttgaggaacttaaacaaatttacaagaaaaaagaaaccattaaaaagttggcaaaggatatgaacagacttttcaaaagacatgagtgcagccaacaatgatgaaaaaaagcccaacatcaatgatcattacagaaatgcaaatcaaaaccacaggaaataccatctcacaccagtcagaatggctattaaaaagtcaaaatataacagatgctgacaaagttgcaaagaaggaacctcccactgttggtggaagtgtaaattagttcaaccattgtggaagacagtgtggcaattcctcaaagacctaaagacagaaataccattggcctcattactgtatatatactcaaaggaatgtaaatcactctgttacaaagacacatgcacatgtatgttcattgcagcactattcacaatagcaaagacatggaatcaacctaaatgcccatcagtgatagatttgataaagaaaatgtggtatatatacaacatggaatactatgcagccataaaaagggacaagatcatgtcctttgcagggacatggatggagctagaggccattatccttatcaaactaacacagaaagagaaagctaaataccacatgttctcacttgtaagtgggagctaaatgatgaaaccatatagacacaaagaggggaacaacacacactggagtctatgcaagggtggagggtgggaagagagagagtgttaggaaaaataactcatgagtactaggcttaatacctgggtgacaaaaaaatctgtacaacaaacccccatgacatgtttacctatgtaacaaaactgtacttgtacccctaaacttaaaagttaaattttaaaaaaagatattttcttctcctttgtttgattgtactgttaaagacaaaatacaacaaatttagtttgaagatctaattggcttttatttgtgattctagaatcaggcaacacttcattctatgaaacagaagtagtgatccactggatatgatagaatggttggtttttgtaaggtgggaataagacaacagaacgataaataaaagtgcattgatagcataagttactacaagtcacttttcttgtaagagttaaaacagagaagacctctttattatgctgacttaggaagattgagctctttgactagttgctgtgaatctcctgttttcaggaaaaactgctctgtttggggctctatcagcttccttaaagttcagtttgattatgaggcactttgcatgagtgacactattttggtctggtctggtctgtgggagtctggtgcagaaggctggtccaaaacaatggattcccataaactgtaacagcacttagtcataaacatctctttcagaattatgttcagcatgtgaatgtccctgatgtccatttgtagtcagatatcaactcctttggaatccaggaagaattttattttgactacatttaatgtaaatctgttttacagaagaatttaaaatatatatcttgcagtatatgaacagaagatacactcctattgaaaaagttcttgatgacatagacagaatctaaatagttatctagcatttagtctgcaagcctacagaatgctagataatgtgatacagttaattttagccaaagtcttgctcatctgaatgtaacagttataatttgtaagagttgtgttaaagataaggcagtattatttaaaaattagtactataatgccacctacctgagtgatacatggtctaatgtatttgcttgcatgttttaaagaaaaaagtaggccgggcgcagtggctcacgcctgtaatcccagcactttgggaggccgaggcaggcggatcagccaaggttgggagttcaagaccagcctgaccaacatgcagaaaacccgtctctactgaaaatacaaaattagccaggcatggtagcgcatgcttgtagtcccagctactcgggaggctgaggcaggagaattgcttgaacctgggaggcggaggttgcaatgagctgagatcatgccattgcactccagcctgggcaacaagagcaaaactccatctcaaaaaaaaaaaaaaaaggtaacatcaaattctattagtacaattatattgtgctcaaaatatctgactatgtattttaggctaggttcatagtctttgtagcaaaaaatattaatcttactaaattcagctttcaagaatcattaaataataattttattgtcagcactatatgtaaggctacatttcatgactatagattcaaagcaacaaaacagcatgactataatgagaatagttaatcatagtgatttattaataatgccagtgtttacattttatctcttttaatgcaataatcccatgagctgtaagtacattttactatcattatccctattttacacataagaaacacaaagcacaaagagtattgaatattagctgaatatcacatagctgataagtggtagagctcgtatatagagctgactccagaaccctggctcctcactgccatactacagtacctcatatatatgaggaaaatatatataagaaaagttgctttgtgtgagatttgctttagctaacttttactacagtatcattatttgtcatttaaaattagaaatagctgggcatggtggctcatgcctataatcccagcactttgggaggccgaggcaggtggatcacgaggtcaggatttcgagaccagcctgaccaacatggtgaaacaccgtctctactaaaactacaaaaattagccgggtgtggtggtggatgcctgtaatcccagctactcagaaggctgtggcaggagagttgctttttaatccaggaggcagagtttgcagtgagccgagatcacaccattgcactccagcctgggtgacagagcaagactccatctcaaaaaataaataaatgaataaataaaataaaactagaaacactctaattgcggcattaatccagataaattgaaaaacattgatattactgatgattacaaagagtcttgaggtcaaataaaagatttagaaaaattatgttttgatgaagacagagttcagatatgttacagtaaaatgagtttacatacttcttatgaccattattagtaagcaaaaatgtgtaattttgtttttaaaaaatggcactgatgacattgactataagttcattctattctaatttatttagactttttattcctgcattcagtaacacccttagcagttttgaggggcattatgaaatttggtatgattatgaagactataacttcagaaactagaagaaatttgcagttaccttgattttgtcaggtaagagaaagaacaacaaccacagagaataaacttcatcagttctttgctctaacaggagctttgttattcttcatgtctatgtttgatactccgaataaccttcattttgcatcctttctttgtgccttcctttctgtctctttctctttctttctttctttctttcttcttaccttctttcttctttcttttttttttttttttttttttgacggaggtttgctcttgttgcccaggctggagtgcagtggtgcaatctcggctcactgcaacctctgcctcccgggttcaagcaattatcctgcctcagcctccctagtagctgggaatacaggtgcctgccaccaagccaagataattttttgtatttttagtagagacggggtttcactatgttgcctaggctggtctcaaactcctgacatcaggcgatccacccgcctcagcctcccaaagtgctgggattacaggtgtgagccactgtgcccagcctactatgcatcctttcacagtgaaattttttaaatgtggatctcatgaatttagagttcattataattcacagacagaaccaaagattacctttggcttaggcgcagagagagtggcaggctcagctaagcaatttgactcacacccaaccagcaactgcagtttttgttacctaatgtgcaaaatccacacagcttattctatttacaaagttgtaaagtgatagaaagctttttccattttccagtcaagtgttgtacagggtgtcagcagcatgtttattaaaacgaagcaacttcatgacagttaatcaaaattctccagctttccattgtcaagaatctctggacctctgagggcttgcccagacatttttgcccaggtccatgtggaactacaagttcctctatgcctccaaatagccaaacagtgtcccagaaatgtttgctccaatctttctcttatttgtctcatgcgccctgtgctagaagctctgttcatctgtatccatttactggtaacatgctcctgttcaacagataaatgagttggtcttcttgtctgtaactggctgaaaaagtgcagggtgagatctcctccaccccagtcctgtccgtctgttcatcatattccatgaccatgtgtcctgatcttttcatctcccatagctgatgtggctactctatgcttccaaaaacttacataatgttaaatcttagaacatttacaagttgtcagggaacatgtacccacccaaaagtaataacattccccccacttttcttcctttcttttttttttttaatctcatggtttatttcagtggaattgaaaaaagtagccaatttttttcacaattggaatttggggttgatgaagggaactggtaaatacagtttggaaagcaatgttctgctaagaaattcagattttatgagccaaggaaaaccatcatatctttttgttgttgttttaatgtgaaaagatcagagctgtgctttaggaatattaatctgactactatgttttgaatgaattaaaaagaggagaaaacagagtcatgaaatccagttactgctgtaggatcaatctgggtgagcaagtaatgaaagcctgaactagtgaagcagcagtgggaatgaagaggagggagacaatggtcagtggaattcgtatgacttggcaattgagtttatagttgaggaagaaggaaatgtcaaaggtaacaggttttgagatgtctattgcccattcctggtgctaataaaattatagaaatatggaacagaagaagaatctccattctgcatttaggatgttagtgaaacatccacaaagaggttattaaccaggcaatagaaatatagaaaccctattataagttttgaatgtctctttactgatggactatgaaaatagatggaatttctatatgcgagtgtggagtatacaaagatatgaattgcatgggattttaaaagtcactgagaaaaaggattgaggaaggaacaaagtaaagaaacagtcaagtagtgtgaggggactcatgagagtacagaatcacagagagccagagagaagagtttcaggcagaaggtttatctgcttgtggtttgttgagcttcttgaacctgcagattaatgtttttcgtcaaatttagtatgttttcagtcattctttttaaaaatatttttctgtctccttctctctcttgtttccttctggagctctcattatatgtatattggtatacttgatgtcccacaggtctcttttcttcagctgggataatttctgctcatctgtcaagttcattgattctttcttctgccattttgaatatgctattgagggcttctagtgaattcttcacttcagttttcaaatccagaatatgcatttggttcctttttctaatttctatcacctgagagtttctgtttattgattcattgctgtcattttttttattattattattctactttaagttctagggtatatgagcacaacgtgtaggtttgatacataggtatacatgtgtcatgttggtttgctgcacccatcaacttgtcatttacattaggcatttctcctaatgctatccctcccccagcccccaccccctgacaggccctggtgtgtgatgttccccgccctgtgtccaagggttctcattgttcaattcccacctttgagtgagaacatgtggtgtttggttttctgtccttgcgatagtttgctcagaatgatggtttccagcgtcatcaatgtcactacaaaggacatgaactcatccttttttatggctgcatagtattccgtggtgtatatgtgccatattttctttatccagtctatcaatgatggacatttgggttggttccaaggctttgctactgtgaatagtgctgcagtaaacatatgtgtgcacgtgtctttatagtagcatgatttataatcctttgcatatatacccagtaatgggattgcttggtcaaatggtatttctagttctagatccttgaggaatcaccacactgtcttccacaatggttgaactaatttacactcccaacagtgtaaaagtgttcgtgtttctccacatcctctccagcatctgttgtttcctgactttttaatgattgccattctaactgacatgagatggtatctcattgtgaatttgatttgcatttctctgatggccagtgatgatgaccattttttaatgtgtcagctgcataaatgtcttcttttgagaagtgtctattcatatccttcacccacttttcgatgggataatttttttcgtgtaaatttgtttgagttctttgtagattctggatattagcccttgtcagatgggtagattgcaaaaattttctcccgttctgtaggttgcctgttcactctgatggtagtttcttttgctgtgcagaagctctttagtttaattagatcccatttgtcaattttggcttttgttgcaaaatgccattgccatttgcattttggtgttttagtcataaagtccttgcccatgcctgtgtcctgaatggtattgcctaggttttcttctagggtttttatggttccaggtctaacatttaagtctttaatccatcttgaattaatttttgtataaggtgtaaggaaggcatccagtttcagctttctacatttggctagccagttttcccagaaccatttatgaaacagggaatcctttccccatttcttatttttgtcaggtttgtcaaagatcagatggttgtagatgtgtgctattatttctgaggcttctgcctgtaccattggtctatatatctgttttggtaccagtaccatgctgttttggttactgtagccttgtaatatagtttgaagtcagatagtgtgatacctccagctttgttctttttgcttaggattgtcttggcaatgcgggctcttttttggttccaatatgttaatttttaaaacatggtttattttagttatttgaatgaaatagagtgaaatagctgcttttaaaaatagctgcttaatatttttttgtctacaagtttagcatttggggacaaccagagactatttttgttcaattattttttttcctgaatatgggtcacgtaatcttggtttttgcacatattataattattttgttggaaagtggatatattagataatatattgtagtaagtttggattctaattttttttaactttatgaaggctattattgttgctgtttttttttttttttcgagatggagtcttgctctcttgcccagagccagagtgcaatggcgcggtcttggctcactgcaagcctctgcctcccaggttcaggtaattctcctgcctcagtctcctgagtagctgggattacaggcacatgccaccacacctggctaatttttgtatgtttagtagagatgggtttcaccatgttggccaggctggtcttaaactcctgacctcgtaatctacccgcctcagcctcccaaagtgctgggattacaggcatgagccaccgcacctggcctattttttgtttctttaagtaacttgcctgggcaaaatttgtaaaaacctttttctctgccatttgcacatgctgatatttctgctcagttaaaatatatacatacaggagaggttccaagatggccaaataggaatagctccagtctacagctcccagcatgagtgatgcagaagacaggtgattcctgcatttccaactgaggtagcaggttcatctcactggggcttgttggacagtggatgcagcccacggagcagggcggggcatcgccttacctgggaagcgcaaggggtcagggaattccctttcctagccaaggaaagccatgacagatggtacctggaaaatcgggacacttccaccctaatactgcgcttttccaatggtcttagcaaatggcactcctggagattatatcctgtgcctggctccgagggtcccacgcccacggagcctcactcactgctagcacagcagtctgagattgaactgcaaggtggcagtgaggctgcgggaggggcgtctgccattgctgagtcttgagtaggtaaacaaagccactaggaagctcaaactgggcagagcccactgcaggtcaaggaggcctacctgcctctgtagactccacctctgtgggcagggcatagctgaacaaaaggcagcagaaacttctgcagacttaaacgtccctgtccaaaagctctgaagacagtagtggttctcccggcatggagtttgtgatctgagaatggacagactgcctcctcaagtgggtccctgacccccaagtagcctaaatgggagacacctcacagtagtggctgactgacacctcatacagccaggtccccctctgcgacaaagcttccagaggaagcatcaggcagcaacattggccattctgcaatatttgctgttctgcagcatccactggtgatacccaggcaaacagggtctggagtggacctctagcaaactccaacagacctgcagctgagggtcctgactgttagaaggaaaactaacaaacagaaaggacatccacactatcaccatcatcaaagaccaagggtagataaaaccacaaagatggggagaaaccagagcagaaaagctgaaaattctaaaaatcagagtgcctcttctcctccaaaggaatgcagttcctcgccagcaacagaacaaagctggatggagaatgactttgatgagttgagaaaagaaggcttcagacgatcggtaataacaaacttctctgagctaaaggagggtgtttgaacccatcacaaagaagctaaaaaccttgaaaaaagattagatgagtggctaactagaataaacagtgtagagaagaccttaaatgacctgatggagctgaaagccatggcatgagaactacgtgatgcatgcacaagcttcagtagccgatttgatcaagtggaagaaagggtatcagtgattgaagatcaaatgaattaaatgaagtgagaaaagtttagagaaaaaagagtaaaaagaaacgaacaaagcctccaagaaatatgggactatgtggaaagaccaaatctacatctgattggcatacctgaaagtgacagggagaatggaaccaagttagaaaacactcttcaggatattatccaggagaacttccccaacctagcaaggcaggccaacattcaaattcaggcaatacggagaatgccacaaagatactcctcctgaagagcaactccaagacacataattgtcaaattcaccaaagttgaaatgaaggaaaaaatgttaagggcagccagagagaaaggttgggttacctacgaagagaagcccatcagactaacagcggatctctcggcagaaactctacaagccagaagacagtgggggccaatattcaacattcttaaagaaaagaattttcaacccagaatttcatatccagccaaactaagcttcataagtgaaggagaaataaaatcctttcagacaagcaaatgctgagagattttgtcaccatcaggcctgccttacaagagctcctgaaggaagcactaaccatggaaaggaacaaccgatatcagccacatgccaaattgtaaagatcatcaatgctaggaagaaactgcatcaactaatgagcaaaataaccagctaacatcataatgacaggatcaaattcacacataacaatattgaccttaaatgtaaatgggctaaatgctccaattaaaagacacagaccggcaaattggataaagagtcaagacccatcagtgtgctgtattcaggagacccatctcatgtgcagagacacacataggctcaaaataaagggatggaggaaaatctaccaagcaaatggaagacagaaaagcagggtttgcaatcctagtctctgataaaacagactttaaaccaacaaaatcaaaagagacaaagaagaccattacataatggtaaatggatcaattcaacaagaagagctaacctaaatatatatgcacccaatacaggagcacccagattcataaagcaagcccttagagacctacaaagagacttagactcccacacaataataatgggagacttcaacaccccactgtcaacattcgacagatcaatgagatagaaagttaacaaggatatccaggaattgaactcagctctgcaccaagcggacctaatagacatctacagagctcttcaccccaaatcaacagaatatacattcttctcagcaccgtattgcacttattccaaaattgaccacatagttggaagtaaagcactcctcagcaaatgtaaaagaacggaaattataacaaactgtctctcagaccacagtgcaatcaaactagaactcaggattaagaaactcacttaaaactgctcaactacatggaaactgaataacctgctcctgaatgactactgggtacataacgaaatgaaggcagaaataaagatgttctttgaaaccaacgagaacaaagacacaacataccagaatctctgggacacatttaaagcagtgtgtagagggaaatttatagcactaaatgcccacaagagaaagcaggaaagatctaaaattgacaccctaagatcacaattaaaagaactagagaagcaagagcaaacacattcaaaagctagtagaaggcaggaaataactaagatcagagcagaactgaaggagatagagacacagaaaacccttcaaaaaatcaatgaatccaggagcaggtttttcgaaaagatcaacaaaattgatagactgctagcaagactaataaagaagaaaagagagaagaatcaaatagatggaataaaaaatgataaaggggatatcaccatcgatcccacagaaatacaaactaccatcagagaatactacaaacacctctacgcaaataaactagaaaatctagaagaaatggataaattcctggacacatacaccctcccaagactaaactaggaagaagttgaatccctgaatagatcaataacaggctctgaaattgaggcaataattaatagcctaccaaccaaaaaaagtccaggaccagacagattcacagccgaattctaccagaggtacaaggaggagctggtaccattccttctgaaactattccaatcaatagaaaaagtgggagtcctccctaactcattttatgaggccagcatcatcctgataccaaagcctggcagaggcccaacaaaaaaagagaattttagaccaatatccctgatgaacatcgatgcaaaaatcctcaataaaatactggcaaaccgaatccagcagcacatcaaaaagcttatccaccatgatcaaatgggcttcatccctgggatacaaggctggttcaacatacacaaatcaataaacgtaatccagcatataaacagaaccaaagacaaaaaccacatgattatctcaatagatgcagaaaaggcctttgacaaaattcaacagcgcctcatgctaaaaactttcaataaactaggtattgatgggatgtatgtcaaaataataagagctatttatgacaaacccacagccaatatcatactgaatgggcaaaaactggaagcattccatttgaaaactagcacaagacagagacgccctctcttaccactcctattcaaaatagtgttggaagttctggccagggcaatcaggcaggagaaagaaataaagggtattggattaggaaaagaggaagtcaaattgtccctgtttgcagatgacatggttatatatctagaaaaccccatcatctcagcccaaaatctccttaagctgataagcaacttcagcagagtctcaggatacaaaatcaatatgcaaaaatcacaagcattcctatacaccaataacagacaaacagagagcaaaatcatgagtgaactcccattcacaattgcttcaaagagaataaaatacctaggaatccaacttacaagggatgtgaaggacttcttatggagaactacagaccactgctcaattaaataaaagaggacacaaacaaatggaagaacattccatgctcatggataggaggaatcaatatcctgaaaatggccatactgtccaaggtaatttatagattcagtgccatccccatcaagctaccaatgactttcttcacagaattggagaaaactcctctaaagttcatatggaaccaaaaaaagagcccgcattgccaagacaatcctaagcaaaaagaacaaagctggaggcatcatgctacctgacttcaaactatactacaaggctacagtaaccaaaacagcatggtactggtaccaaaacagcatggtactggtaccaaaacagagatatagaccaatggaacagaacagagccctcagaaataataccacacatctacaaccatctgatctttgacaaacctgacaaaaacaagaaatggagaaaagattccctgtttaattaagtggttctgggaaaactggctagccatatgtagaaagctgaaactggatcccttccttacaccgcatacaaaaattaattcaagatggattaaagacttaaatgttagacctaaaaccataaaaaccctagaagaaaacctaggcaataccattcaggacataggcatgtgcaaggacttcatgactaaaacatcaaaagcaatggcaacaaaagccaaaattgacaaatggaatctaattaaactaaagagcttctgcacagcaaaagaaactaccatcagagttaacaggcaacctacacaatgggagaaaatttttacaatctacccatgtgacaaagggctaatatccagaatctacaaagaacttaaacaaatttatgagaaataaatcaaacaaccccatcaaaaagtgggtgaaggatgtgaacagacacttctcaaaagaagacatttttgcacccaacggacacattaaaaaatggtcatcatcactggccatcagagaaatgcaaatcaaaaccacaatgagataccatctcacaccagttagaatggcaatcattaaaaagtcaagaaacaggctgggcacggtggctcacgcctgtaatcccagcactttgggaggccaaagcgggtggattgtgaggtcaggagatcaagaccatcctggctaacacggtgaaaccccgtgtctactaaaaattaaaaaaattagccaggcatggtggctggcgcctgtagtcccagctactcgggaggctgaggaaagagaatggcgtgaacctgggagacggagcttgaagtgagccgagatcgtgccactgcactctagcctgggcgacagagtgagactccgtctcaaaaaaaacaaaaaaaaacaaaaaaaaaaccccaaaagtcaggaaacaacaggtgctggagaggatgtggagaaataggaatacttttacactgttagtgggactgtaaagtagttcaaccattgtggaagacagtgtggcgattcctcaaggatctagaactagaaataccatttgacccagccatcccattactgggtatatacccaaaggattataaatcatgctgctataaagacacatgcacacgtatgtttattgcggcattattcacgatagcaaagacttggaaccaacccaaatgtccatcaatgatagactggattaagaacatgtggcacatatacaccatggaatactatgcagccataaaaaaggatgagttcatgtcctttgtagggacatggatgaagctggaaaccatcattctgagcaaactatctcaaggacagaaaaccaaacaccacatgttctcactcataggtgggaattgaacaatgagaacacttggacacagggtggggaacatcacacaccagggtggggtgggtggaggggggagggatagcattaggagatatacctaatgtaaatgatgagttaacaggtgcagcaaaccaacatggcacatgtatacatatgtaacaaacctgcacgttgttctcatgtaccctagaacataaagtataaccaaaatatatatatacacatacatatacatatatatcaatatttatatacactaatataaaatggatatgtatacatatatacatatatctacacacacacacccatatacatacatacacacctctaaacctggattcctaaaggttttcccatgccagtatggcttagtgattggatagaggttgtgctgaaacacttgagccaatgaagtttctgtcttttgccaaaggatctctgtgtggtaggggagctcactcagagttcaggtgctttcaagctgactcaagctccagcttttactgaccactggaccttttcttatctcttttatgcaaacaaattcaggggtagccgggattgagtgactagctcgggccttctccaggaaatatacacagccagagaagtattctccaactgtgactacagcctcagactagtagagcagttggctttccctgtttacccacctcagagatcagcacttttaccaaatatgctgctgggagtggtcatttctcatcactccagattgagtgagctctcatggatcgtgacagagaagctgcctgtcctcatggcctggcctccttctataaaacctctgtccttactgaagtgaggaggaagggagggcagatatgtgagtagcttcaggctagaatgccacaggttctcattattcttatattcagcagtttttcaagcctaaacacttctcaggttgtatgcctttggttgattttcagagtgctaaaatgattgtttttgtcaattttatccagctttatagttactttttacagagagaatttgtctcctcacttggccataaccaaaagctcaccacttactacctttaaaagaatcacttacatattaattatttcatgtttacatgcatagtctttttaaaaaaatacctaaatgtactactcccttttatagtgtttaggaatctgaacttataattttaagaggctaattagctcaaatccagtttcatttttaaattttatatcttgcttttttctatgtcaaaatgatttatctcataagagaacaggatagtaagaaaactgaaaagtgatcaggccatttcgtatgccttaataaaaactgcccaagatggtatggttgaggaagagtatgaagatcaatgggtatgggcctacattattctaggactgacttatttccctatagagtggaaatcttctacttctaacttctgtggcaataaattctttttttaaaagcatgattatatgagaactcttcagagaaaagaacttgtatctcttcttttcgtatcacaaaagcttactctagtgaattctgggtaacccaaactgaaaattaaatttagaatttgcagggtcatgagcttctacccagattatctcaggaaaaggtattaaacaggaccatcattaccccattaatcataaaaaagtccaactgacacaattgtctattctttgagggaacaaaaaacccagtcaggcagacattgttttgtactcatttggtaattttgatatttaagactattccttggacagaaaagtatatgactctctaaatgtcaggcaagtccataccactatgatgatattctcaaagatgagttatgttccatgcaagtatattcactaaacgtgtacggtaccaaatactctgactccaagtaataaaaaaaaatagcttttgggtcttttccatgcctttagacatgacgaacatagactatttaattgtataaagattttcctggcatatcttccttttggaaaaaaaaaaaaagtcctgaaagtccttctgttttatgaaatattctagtctctgttctgcattatattattttacatagaacttacagtcttaaaaaagaatgttcatttgttaaaaagctcccaaattgactaatattattgctattatagtttgtttttacatagtgtttaatagaacatttgttgtgattaagcaagattgcttctttgtcttcttttctcttttcttccaaatagttcaacgccattataactttcctgtaacagagatgggaatgttttccttcactgaatccccatctcatgaatctacagtcttgaaacccttattttaacagaacagtcatctgactcggtttggctgtctcataccaagatctcagggcagcaacagagtaacccttgctggtacctgtgagagaaaacaaagggtctgttttgagtatagtagaaggtaaaaaatgaacttgatacttcttcacatcttaaaacttttatttttttatttaagaagtatgctaataagttgtaacatgaacatttaaatccctaggaaccatctttatagttgattataatatatttttattggctgaatatatcacaactacattctattccactctattatagtgatgtttgttatttattaataactattatttttacctcattataaaatagctacataataggaaatgtttagtaatgttctgcaaagaggaaaaaaaagaataagggatattgaccatcttggatagtttttcatgaattcaaagtcctcagtaagtgattttagaaactcaactttatcaacttagttcaaataagcagtctttgctgattaaaatagtcttttctgtcatcagagtattccaattctaaactcagagaatttaggaatttcagtttataatcagaaagctccctggtgaactatgaatagtgacaaaggccttaaggaatatttatcccaactttggtagaacctggagagttgtcttttacattttatcatgcacctttctagtaactgcagttcttctatcccacagtggtactctttagtttatgggaaatttaaatcccgatattaaatctttattaatttgtgtaacctccttggttacactggcctgtaaacaaagctcatttcagtctctgctcaaacccttggaaaagttagttaatatctctgaacctcaattctgcctgtaaatatgtaaatgaaaggaaccaattagatgtctagctataacatttcttgattttaagtgtttatacttttttagaatcaccactctccatatatttgtgtgagctagtcaactattatctatctactcatggcctccttggtacaaccagtcctttcagaccttaacttatcctgttcctgcatccaagaatcaattcaactaaaatggctggtcagaaccattttttctcttgatcacaagggttctccaaacacaaggattcctcaaatgataaaatacctgctccagaagaatctctcaatatggtgctgaatttgcataggttattgatcctaatttctagactctgaatggaggctagttgtgcttggagcagtggttctccaagcataaggacttaaaatccacagggttagtgctgggtgaggcagaggtcagtagctcttgaactggatagtaaacatcaagaaattgagaaataaaaaacaggaactttgggatgctttttaaaaccaccacagcctcagatgtttgtgttgaaggagtaagatggccaagaaaaaaaaaatgttaggtctgagagtttactcattccaataacagacctggcagagaaatcattacccattttgcaacacagccttagggcaagtctgggcaagctctgggtgggcaaaaaataggctttccaaaactcacctagctttccagcccaccccacgtacatgccccacacgtgaagtcttcctttctttcctcgtttctttctccttcccccctcctccttcctctctctctttctctcttccagaatgaatgatttgtatgactgtggaatgtgtttgtcagacaagtccatcagggacttataacagtcccttaatagggtaagagagagatatgagtcttgtggtcataagtggttgggcttccccactacctcattcatttatgttagctaactattaaaatctaggtctttactaatttatagttaaaatatacataggagtaaatgtgtgtttgtgtgtgtgggtctgtgtgtgtataaacactgatggatatttttccaaatgaactgatgatgacctctaacttctggttcatgagaaggaactttatgtcctacttttgctctggaaaaatgaaaagactgctaagggggagtagtcatgatggaattgtgcatgtgtgtgttaggtaatattgggtggaaaattaagggatattttcctttgtagtattccaaataaatctgtttatgtgatagatagttacttggaataaatatctttcttcatgagtgccttcttaatttccagaaaaatcttataaaggtttctcagtaaggttctttaaataaactttgtttcaatcataataatactagctaccattgagcatttacacttcctagcattgtgtccaacactttacattctttatctctcatccttatactctcaaaagatgaggcattgatattcccagaaaactgagatttggggaggctaagtaaatttgcttaaggttatggaacaaatacattgcacagctgttacttgatcatagatctgactgtctccaaccattggacacttactgttgtcacataaggggattcagacagatatctagcttattttataactgttctcatttgatgagagattgtctataaagatgtttggtttttgtgagctttaatggctgatgtaaaacaatttggtaattattttaaatttaaaaaaatcttataatcaatctaaacatactcctatgtcatatactgagactcttagaaaatattttagagtagaggcaagcagtcttcagatactgaattataatgcctatctacttttaaagagtgatatgacaccactttcaaaaatctagacttcagatggcttccaaatgtacacctatatctacagcaatacttggatatagtatttcctgaaatatagtctttctcttaaagaaaaaaagaataatattagttcaggtccttgatatatgaggcaaggattagagatttgttaagtaaatgttgacccagactatataactctaatgagcaaaatccctttaaaatttttaaggagatgggataacagtaagtaatatttattgaaagcctgttgtgtgttatgtgctactaggagcttagacaacataacctcatgtggaccttacaactgctctggaggtcagtcattgttcttgagtcgggctcttttttctggtataagaaacagagtcaccccctcatgctgtctcaaaaggcatgagttattttaagggagagtgggtggagggtttgtacagtaagggaaccaggaagctcatggaattgtcatacaatctggccttacaagcacttcagttacaactctgtcaaaatgggaaggggctcaagaaacttgcttttcccatctaaggaaaggatggtattttctggcttttggtgaggtgatttatcttcagaatgggtctaatctgaaaacagaccccactgggcagaaacatgaaatccatgttcataattatgtaaatgaaatgaaaattacttgcattcttataacatctatataaaaattataattttctgtttattttcccacagtttttcctgtaattatattttttggttacattactttttataataaaatagtgacatgttttacattactttttataataaaatagtgacaggttttataataaaatagtgacaggttttataaaaagccaatctgtaattggctttttaatgaaatgtgctttccatggaaatacgccaaatttgacactggtgtcaatttcactgtactcattcacatatataatacacactacacatttttacatagacacatacatatataaaggcacacatacctatatgcgtaattcatttaagcatttttattattggacacttgagttgttttcagtattttgctaatttaaacaacaccatgttgaacaactttgcatacatacagtttcacacatacgtgcatatattctaaggagtggaattgctggatgcaaatttacataccttttaaagatttgttacatatttgtcctccgaatcctctctcaaagtattgtaccaatttatacttcccccagcattatatgagactcacaatttctgtgtaccttcctcaaaccttcacattcttctaatttgagcacttcaggtatgaccagactgtagagcctcaggttactgcttatttaccaattgtttttcagctgatacttttaagccttctactccaattaggccacagactcctatttcctttccttttaggataatgctggctagggctcatttagcctaatttctgttttgtgccctagtagagtagcttcctttgtccatgcttaaatgatttcagaagtctaaaagcgaattttccaatacatatacccgcttctttcatgtcagtaaaataaaagcattatgggactgctcaatttgatatgttatctcaactaatctgttaatactaaattgcagacactcaaaggtgagaatcagtcctaggaagattgtgagcaaccagtctacaatgcaaatactaagcaggctcaaaagcagatctataactacagctgcagctccatcaaggcaacaagtggacacatcctggcaaagtacaatctgacctcctttgttttacatttgctcattgttctttaacacattttaacttgaaaaagttaaatagccttcaataacaagacaattacactgtcatagaattagtgttgaaatcttccagctcacatactagacaaaacatagttcgcccaataactatctggaggatccctgaagaggatgctaaccacatgactattgcttcccttattcaacccacccctgaatggcatgaaggctgttagctcagagtgaagaggcttttaaacgctgtcctgtagattggtatggacaggctgcacttccgatttatctagagagatataagacatgatccatggccaaggtaatggggtgggctcagacatttttaagttcctccagtaattttggtaaatagttctagtttttggaactatggctcagagcatcaaagagaaatgtagctcctgctcccatcctgtgaactttacacaactgcctaaagctatgatatctaatatggtagacagtagccactaggcacatgtggctattggccacttgaagtatgcatagctagtcaagatttcaaagacttacactaaaaccataatgttttggacatagggggttacataaaagtattataagacctaatttcatctttttaaaaacatattttaatgtggcaataaagcatttaaagttacataagtggcttacattatatttctactggacaattttgatctagaaggcataggttccatagctcaggaactttgagtcataaaattttaaagttataggaatcttgtagatgaaacaattatctcactttgcgaatgacgaaacaggtaccccattggtaaagtgacttattctggtaacctgagttgttggtagagccagggtattcccgaatcccacaactctggatttccatccaatgctagcttctccctcccgtgctgcttgtctttggcgacagtagccacactgagtgttttaggattcctagaattctgaggcatagaaagcctcaccactcatagcccctgctgtagtctctgctcaccagattctgtttgcataactaatgcgtccaaattcattactacagaaccatagtcatgcccttaagcagatgcctcctcttttcaccatctcacattattagttttgcctccacacggagctatggtttaagtgaggccttagtatctttgcaaaatatggttccaaaaaacaaattctacttatttgagtagtgtgacattcactaataatatttctcccacccgcatgtttactaacattctggttttctctggcatccagagaacaatgtttcttcttctccagtactagttagaaggatcaagtgttgatgggtggtgagcccctccctggctcatgccctttagccacaaaaacaagttatcagccgggcacggtggctcaagcctgtaatcccagcactttgggaggccaaggcgggtggatgacgaggtcaggagatcgagaccatcctggctaacacggtgaaaccccgtctctactaaaaatacaaaaaattagccgggcatggtagtgggcacctgtggtcccagctacacaggaggctgaggcaggagaaaggcatgaacccaggaggcagagcttgcagtgagccgacaccgcgccactgcactccagcctgggtgacagagcgagactccatctcaaaaaaaaaaaaaagttatctttttgcatggcatcagcagagccttgcttatataacagttattttaagccaaaaaattgtttttcttctttctcatcttttaataaaatatgtaagaactttaatagtgttattggtaagcatccaaaatatttagaaactacttcccctaccacagaaatatttgctgctctgaagggtgcaaaggatctactttccccaatgattccaagccagttgagattcatgcatatatgtcccaaaatgtattaaaatccgcgtgcgcacgtgtgtgtgtatttttcaaagtcagtgcagatgcatagaaatgcccggcccatgtctgttgcattttgatgtatttccttctgaatgcctcaagtttaagctgatctgtcaagtatagaatttatagggagtaattaacccaagtcactgataaattaaaatgtccctaggcaaataagagtatgtgaataaatctgattttttaatgatttcttagaacaggtcacagaaatactttcaatttcagtcctttactgtctagttgaatccttgctgctggaagaaggcaggcaagtcttctttgcctttcttcaaagcctggtatccaatgcagcaaaaattcctgatcatgagtctctttcctacatgacttgtaggtgatttttttgtttgtttgttttttctgctactgactgtttctgatcatagagatctagggcaatgacattcactttgtgaatagtaataaatgaaaatgtcatgtttggagatataatatcactaccatctgtaatagcagactgcagcctacattggcataaatactagtgccatacaattatttataaatggagctttgttgaggggaagagttattctttaattaataaaaatctaagacaaagtggtgatggaatatgccaggtgtagggtagaaaatgcagttcttggaagtatccttcccagtggcaggaactgaagactccagatcaaccaggtggaccttttcgttgatgagctgatagcttctaggctgtggggaacctcaggtgccttacaactccaactactgcagaatttcttgttgtgcctcataaacaaatgatcttcctattggaagagctacgtggtccttggacaaacaaagatagtgtattgctttaaaccttatctatttgctacagtttccttctcctgccaatatgagcatgcctctaaatgccacaaggtgtttgaatttaatcaaagttggctctacttttgccttttgtttggctaaagcatcaagccatcttcttgatgctttattgtgtttatcagtcagatttatgtaggttagaaagcattcagaagtcattatttcagtttcatagttcttagaggtctatacccttaaactttgaaagtaaacatgaacagtatctctctacacatacacagtaacctcagtgcaatgtttttaagcttcaagttgcaatctattagtgggtcttgaaatctatttggttgatcaaattctctttcttttttaatgaaatagactgaaataaaaaatagaaacattgacttctgaaactttaatatatatatatttctatatctttattgtctatcttcctatttatcatctgcctatccatattagttttagtttaaagaaaaggtttgaagaaaatctgccttaagggaactctcagaaatagattattagagtacataacaattcttatgatttcatgctagactaaatagggaacacttactatacaagcatttgtaggtttgcctctatgatatctttcacaacttcctccttctaaacctccatactattatttttttaacggtagattagaaaagggggtaatcataagtcttaaggattttagtaattgttgtcaaccatctatgatcaaatttaaatatacttttcttcctatttataattttagttcagctactgtagttatatagcttttgtttcctatatatagcaaatactgttttaatattagtaaaattcagaagcttcttgtctaggtttaaatttcagagaacgacagctgatagatcagggataaataaaagttagtattattctttcacactcagaataaaaactgtaatacagatcattaatttcagtacagtgtataggacaggtaatatggttaagtggaaacagataggctttgcaatattattacaaattaggaatctataatacttccattacttttcaagcatatgctagctcatctatcgttctgagtgttgatgtagctcattttactcaccaaatggcatctgttgacttgtgaggcaagatctcttaggttagtttgttaagccatagtcattcttagtagcatccaaagaaagcacagttcatatggcaacattattttcaaatgattccccacaaaattgttttacttaaaaacttgcttaaagagaaggtatattacaccatggaatactatgcagctataaaaaggaacaagatcatgtcctttgcagagtcatggatggagtcattatcctcagcaaactaacgcaggaacagaaaaccaaacaccgcatgttctcacttataagtaggagctgaatgataagaacacagggaggagaacaacacacactggggcctgtgggtgacaggggagggagagcatcaggaaacacagctaatggatgctgggcttaatacctaggtgatgggttgataggtgcagcaaaccaccatggcacacatttacctatgtcacaaaacacatcctgcacatgtaccctggaacttaaaatttttaaaaattttgaaaaaggtaaggaatatttatctgcatctgcatctggaaaaaaagtcatatcttgacatgtattttaatatttcatttgtaatttcctggtaattttacttattgaaacatggggaaaatattcaaaagctagtttttaaaagacttgaaaataaaggtcacaccattatccctctttaaatagagcatgaatatttgaatgaatttaccaatttagtgttaactctcagtccctttgtaacattagtgtggatacttaatatgtacataaatttggaaaaggtcgccacgttggccgcatcataattctaataaagtcagatgctcaaataccacttttaataactttcctattaagccccagcactttaaagatgatagttaattttgattcttcagttacttattcctctgtgatgaatttgacatttttaatttttttttaatgccttgcatgccttggggagaaaagaaaaactatgagttgagttttctgcttttatgtgctaatatttgtgctgactgcatgacaattaaattcactggtcagagttctgatgatttgggatacattttttaagatgccattttttacagctattattgtaaaatttgaggaaaatgacatctataatttttatcatagagccatttatattctaatattaaaagagattttaaaattatgtaactgaagttttttgttttgtttttgttttttttgagatggagtctcgctctgttgcccaggctggagtggcgtgatctcggctgaccacaacctccgcttcctgggttcaggcgattcttctgccttagcctccccagtagctgcgattacaggtgtacgccaccacgcctgggtaactttttctacttttagtagaggtggggtttcaccatgttgggcaggctggtgtcaaactcctgaccttgtgatctgcctgcctcagcctcccaaagtgctgggattacaggtgtgagccactgcacccggccgaatataagttttaacatcaagaaatacccatagcttcttagtttatatggcttaatgagcttttttgagatttacaaaataatcagattgttttccagaattattcctggactcacaatttgtaagattcttttaaaatatctcaagagagctgggtgtgatggtgcacatctacagtcccagctgctcaggaggctaaggtgagagtatcacttgagcccaggagtttgaggttgtagtgagctatgatcctgccactgtactccagcctgggcaacagagcaagaccccatctctggaaagaaaaatttgtgtgtgtgtgtatctcataagcctctggctgctctccaaactcttatttagtcttatccagtagaaacacattaaccatcaaataaatccttgatttttactgaaaaataaagaagcttatatttagcaaatgtactatcacaatagtacttctcaaaaagttcctgtttaatgcattatgtcatcaactgattaatgaaaagggactcacaacaaacgtgagtcgtatctgaagctacaaaatagagctattctatcatcctccttctgatgaaaattatctagactatgtattgtattatatacatattttgtatatgtcattatattaaaatatataccgttttagactgtaaagaccctcagagatattctgcaccagtggttctcagatgggattcactttcaaaagctgtaaaacttgtttagactatgcatcctgcaacaggtaaactggaatctctgtgatagggccccaggtatcaaaggtttataaattccctaagtgattccaatatacagtctaagtgttaagaactattggcttaggccagtggtcttcaaactcaaaggtacataagaatcacctgcagagttttttaaaacatggattcctggccctcacccctagagaatctaattaagtagatctgggattggtctgaaaattttcaagatctcaagtgctatggactgaattttgttccccaaaattcatatgtaagccccaacccccaatgtgaccatatttggaaatagagcttttaggattaaagaaaggcaaaatgaggtcataagggtggtgccttataagagggagaaagagaaatcactctatctccatgtgcaggccacgtgagaacataggctactgtctgcaagcaaggaagagaaccctcatcagaaacagaattggttagcaccttgatcttgaacttcctagcctccagcaccgtgagaaataaatttctattgttttagccatccagtctatggtattttgtcatggcatcccaggctgactaatgaatcagtgatgctaatagcagtggtccatggaccatatttttgagcacctctagcctaggccacatcccccagaaatttcgctttaatttgtctggaggtagtacagggcatcatttattttcccaaagtttcctgggtggtcctaaagtataaccatacttgagaacaaatgaagtagaatggtttcttctatttatagctaaggacactaagactcaaaagaagttaagtgattttcccaagttatcatggtttatgctactgctgatttttccaaatgtacaggggaagtaaaaacagaatttcttctagggtcaatttagtcctagaacctagaactttcagtttccagaattaacccattaatttccccccagacaacattaaaatttgtcaatttcaggcagattcatttaaagtaacttttccattatactacaatccaagattgttgtatcctatatctatttctactttgtaacagttgcttttttttgccacgtttaatgactgatcagaaagtgagatatttaaatatatatatacacacacacatatatgcatatatgtgtgtgcttgtgtgtgtgtgtctatatgatagatacttgccacatgtttaatgactgatcagaaagtgagattttaaaatatacatatatatacacatgtgtgtgctttgtgtgtgtgtgtgtatatatatatgatagatacttagctgatcttcacaccacaacattaatctgcccaccatgaacagaagcactgctatcaagtatcagccttcttgtataataacaggaaattcagaaaattgattcatgcaataaaaagatggaaatttattagaacttttaaataccttaattcccaggtataatcagaggaaaaataactcaagatgggtgaaagtttattaaagatttcacctcaaggacaggcatttagttagatagtgattttacatatgtagtgatgtgaacttacattgttcatatatcggggagaaattacatcataagtaaaacaacacattaagcttaacgctgctaaatgaaaggtgccatcccctgcacattctgagtaggcacttgatttctttcaaaaatcaaccttatttcttcttaggcactgatattttgttaatggagcaaatgaatctacattttttcataaattgccagagttaatatgaaatatgcacttcccaaaaggagaagttagttgtacatttttggccaatgattcagcaaggagaagtgagaaaaagaaaatctggctaggaatcaggaggcttgacttctccttccacttctaactaattagcagcaaaaactggtaacagtccccatctatgttaaccttggtttctttgtaaaacaaaatggttagaatataattattccaagtttccttatacttttctcacttagatgacaaatacttctaaggaatgctgtgttttttgtttgtttgttaaactgttgttgggtttttattttgttattttaacatttttttaaaatggcagtgtttccatttggccaagatgagtaaaaatggcaaaatcaaaatgtcactattaaaaaatcaaaaatgaaagaaaacatggaaaaagaaccagtgtgtattctttggagtttggtgagaaaggacatagaaacatgtcactagactacatacttaagtttaacatcagcaaactgtcgactatttcccatctaaaagatactataaatgcaaaatagccaagattttctttgcctgacacgggtaatctcatcagcagaagaaaaggcctgagcagaaggagaagtctgaatggcctggctgttaaatgttttactggaattcactatgtgtaatactcaggcagcagaaacttgaagtgaaacattaactgcaatatgaagtcaacttcactagttcagccagtattgacatcaaatattatttttcccaaactgcatatccaacaaaagtatttagaaagaaatacattagtgagcttgagttaataaaaactaatcttcacaatattttatataattaataaaccagaagaaatgtggcaaataaacatattctctaattaatacttcctttggttcaagtacctgtttagtaacacttttttttttttttttttttttgacaccgagtttcactcttgttgcccaggctggagtgcagtggtgtgatctcggctcactgcaacctctgcctcttgggttccagcaattctcgtgcctcagcctcctgagtaactgggattacagtgtgcgccaccatgcccggctaattttttgtgtgtgtttttagtagagatggggttttgccatgttgcccaggctgatctcgaactcctgggctcaagcagtttgcctgcattggcctcccaaagtgctgggattacaggtgtgagccacctcacccagcctatttagtaacactctataaaacagtggttccaaacttttggtacattggaatcacagagttttaaacacctcaaactttctaatttggttggtacagactataactggggcatcggaagttctttttttgtgggggggatggagtcttgctctatcgcccaggctggagtgcagtggtgcaatcggctcactgcaagctccgcctcctgggttcacgccattctcctgcctcagcctcccaagtagctgggactacaagcacccaccaccacgcctggctaattttttgtatatttagtagagacggggtttcaccatgttagccaggatggtctcgatctcctgacctcgtgatctgcccatctcggcctcccaaagtgctgggatcacagccgtgagccaccgcacgtggccggaagttcttaaagctctccagatggttctaatgtgcagcaaagtttgggaagcaccactacgtagcattggttctaactctggctgcacattggaactatctcgtacctttaaaagcatatggggtatctggacttcatcctagaaggaattaaatcagaatttctaagagtacaactaggcattggtgtgttttgggttctcccaagtgatgctaatatgcacccaggggttagaattactattatagaatactgccacgacaatccttatctcctcctgaagagcacagaaggcttgatttccaaactattgcaaaaactggcatgacctcaactacttttagcagggttctgagaggtagggtatcactcaccttaattgcttcagatcctgcctgaaaaatgcccaggcatgttccagtccacacaagactgattccaaagggtgtatctctcattgacagcccctagaaccattctaagttatgacaataaacacctacttactgagttctcattccttggcaggtattttatatacaacgtttggtttgctccttccagaaactgtatgagaaaagtttgcatatcaaaatcctactgatgagaaagtggaactcaacaatgttaaatgacttgcctgcctaaggtcacacagttagtgacagagtctagatttcagcctagttttgttcaacttcaaagtccttgctcttatttgatggacacattaaattatccaccatggtatctagactgggacacagccacaatctgaaaattgaattctaatttaataaacgtgccctctgccaggaaatatgaggaatggctatagaaatgaagaagagtctctaccatgaaggagcttataatactaaatgttacactccttttggtctattaagtctaaggaaaagaataaacatctaatttcattcattcatgtaacaaatatcagtaatttttgtaatttcagagaacaatattataatttggaaggtgtttaggacaccttaggtagtttataataagaggtgatataaaatcatccatttcaaaagtcaattgtcaatgaatggagaatagctttcaactgaggccaggatacgcaaactgtaaatgaggctttagacacaaaaagttagtctaggccaagtggtttagtggaaggatcctagattttatgtcagaaaacataattgttatgtggtctgaaccatttatggtttgggaaattcactttaactttcagagcctctgtttcctcatcagtcagtgcctgtgaggataaaaggagacacgtatggacgtgcctggtacatttcatgacctattagaagattgtgaggccaggaagtatgtacctgcagaaatctcaaattgtgacttgcagtggaggtggaattcaattattattaagaatgtaggtcaatgtttcattttttttaaagatgaaaactaagcccacgaagcttgagtcatctggagatgaagcagtcgcagcggagcagtcttggtaatggagaagatcatgtcagcgctgagaaaggcagggagggaggcctgagcaaggaagcttggagaagcctctggaggatgcctggccagggctgaatgctcagaaatggaagggaaagctcaggagattatcactgaatcagtaagtacaagtacagggcagtatggcttgagcaaaccaaaatgatcttacttcttctgtgatctgaagatgagagaatctataggtgcagggtaaggcagttttacaaatagaataattttggcctgaggaagaaaaacaaaaagcatttcaagaatggaagcagatgtatagtcatggaccagactgattagtaaaacataaaaggcagattaaaatttagtttaatgaattaaactcaagaggagaacagaagccgcatacctgtaacagccctgtaatattgttactctgttattttaggctaaagccaagaataaactaaggacgacaacaacaaaaaataacattttgttttgttcagacaagaagaacatggaagggatgcctctgcttgagataaaatggatgactaaacaaaactaattcccttttttttgtcttctctattatgtaaaaataaaccattaaatgtaagggataaaataagctttcaaagagttaactgaaaagataggtgaagaagcttgtaagaaaatatgtcctagctgtctaaagcttaacttcttcttgcctagtaaatttccatctcagcaaggagagtttaccaataaggactctcagctagaatcagcagagggagatgaacactaaaaaactggaggtggacagatggagttccagtttttgccttagtctgaaaccgaggcaagaaacttttcacagatactgaacaaaatgaataaacctattattaaaatgacatctggatacttagaaaaggaagacacaattttgtagacatgaaccacaattcactaagtagtcatttcctttgttttttgacaatattacagtagagcaaagacatccaatagacaaagctcatctgctgtctgtttggagctgcatctaggcgtaaggggtcactttttcctaatccttcagctaaggtgagagtggggatacctttttctaattcttacaaaagtgccacgtacccatgtacacaggctgctaccctgggacaacagacaaaaataggacaaggtaacatgtgggtcctcaactgataagaatgttcatcagtagcattcaaatccagtgtcggttggcagaggaaggtacctgagaatgagaacttaaatgatggcatggcatacagaccggatttacagaggtcatgaaattgagaggtggaattactcagttatatcaatgatacccaatatgtcaacaagctaagaggcctaatttaacacaataaaattcagtagaatcacaggtaaagtgctgaacactgcattgagtgtagttgtttagttcagtgattctccaactaaacttttaacactttaaggttttatttggtagattgtaatatggagtcagctgggtaatattgctgccatggaagctccaaggatatacttagggaaatacagtaattacaacaaagccattaaacatctttctagtttgtcacttgggtgaaaccttgaattcaattcttggcatcagggtttgagagagatgttggcaaagtaaatctcctcctgagagctttcctaatggatgaagaaaagctgatggagttaatatgtacccaggtaaattgaagtattctcctgtggaatcaaggctaggtgtatcctgtagattccagagagcagaatagcagatctgttgagacttactgtaatggggtgggcgggggcggggggacggggggggctttgcacaaagtgaatgtcatccagaggccaattcgcaggtcactcaaaagcaaaattgtggggggtgtgagggtaaaggggagcaaatgacagtcagtactacctcctttgaagaattctcaatcctggttgtacattgtgatcatctaggaagagattttaaaatgcagatgctgatgcttagaccctaacctcagagattctgatttgttgttcttgcgtgggggtccccattggaaagaatttattatagctcccctgctgattctaaagttctaggttggagaatcactgaactagactactacttgctgagaggttacgtaaattaaaccagatgttttttctaaagtctctttcaaatttgagaagataaatggaaattaacacttacggattacataatacagctagacactttcacaatttattctaataattgaattagtatatgtaaatctcttagcacagtgaccgtctgatatggtgtagtaaactctcaataaacattagctatttttattatatcctctccataactgttcaaacaaggtattatattgttacactatagatgaggaaactgaggttctgatgttagttttccaaggcccacagtagtaaaagcaaagtttggatttgaaccaaagattagttccagtttccagagccctcttctctcctcgacaggccttccctaaagcatcaagaagtttatgcaaattagtggttcacctgagtgaacatttaaaaaatttaatagtaccacttcctcttgacctgtttgtaaggagttcctcttaaatgcaatttctgaaaaagagaagcataaactgagacatccacattttttccttatttggccaaatagaagtgagaacctctgaggatagaggaattggatggaggtgcccttcagaactcatggagaaaagcactgctcccagtaaaatatctctcattctaatgaatgggtaagtatcctacaaatctttcacttctgtacaatctaggtctggtaggttacttgcacacactgggtggaggtggaaggggcaaagtattcctgaggtgatggccctgatcctacctcacatctccttggggcctggttggacctggctgagcgtgtttgagcagtggctgatttttggaaaacaggaggactcttctccaggaggctgtgactaccaaggttgcaaatgctccacctgaacttgggtgcatgagggatctctctctctcacacacacacacccccccaccgcgtaagataaatttctgtttgtgagctgcctacattaaatgctttgctcctgaccttctgtgattaaaatctgttccgtttgcagggttcggtgcgcttggatttagtgtattttgttggtacagtaaaaaagagaactgcttctctataggtgacccccgccccaaagtcccccctcccactaacttctctttgagaagagagtaaaaccgaattcgagagaaaagaggcagtaactattcgggaggaggcagactggagtgggcaccagtcccggtagtaagagtcttaacgtcttcctcgctttcctctcgcagagtagtatggaagcatcagctcctccccctgggcctccaaaagttacctttcctttgggtgtgattctcgaacccgaagcgtttgagtcctaagaaactagaacaagttagagccaaagaggcctggcgggcgggggtgcgggtggagtccgggccgggtggcgtggaaggccgagcacagctgcgagcggcgagtcccgggagaggaggagcgggagaaagcggggcgggcctgcggtcggggttcggccgggggagggggtccccgtttccctctcctcatcctcgtctcctctggctctggtgacgttgcggtttcctcccccctccagcggagcctcagcgcccgccgcgtccctccctccgcccctttcgcccacacctacccgcccccgccggcccggctctcagtagcgtcgcccgaggctgcagcagcgcatcccggggcatggcgcggcgggggcgcggagggctcggttcggagggggccgggagcccgggcgccctggagtgaggaggaccgggagctggctctggaggctgcggaggcgacgccggagagaacgaagcctcggctgggagcggtaagtggaggggcgcgcaagggacgagctggggcgcgcggcgcaactttcttcgggagtttcgggcgggtagccttcggggctgtcccggcgcgggcgggagacggagagccacgtccccggctgagagcggagcgccgcgggttgcgcgcccgggcccggctcggctggactccgagagagcgcctgacgcgtgaagcctgagccacgggcttccccggcggcggagcagcctcgaggggcagcttttcgatcctccccacccccttgaacgccgagcaccgagccgggaacacgatgagaacctggagatcgcattccgtgcgtcggatctggccggcccagccgcgatttcctcgacggtccttggggcctcggcttcactctgcggggttgggtggcacaccctcgcgtcctcctttccctccgtaccccagccatttgggggcaggggaggtggcggcggcttgtgtgcagatcctggcgctggcaaccctactttgcggctgcagaagccgaggaagagctccccaagcctctcccagacgctggattccagcgctcctgggctccgccggcactcggagaaattgttagtaaacctcatccccgaggcagtcccggggaggggaggaggcgggggcttgactcacagactgggaagctctgaaagcgatgccacatgggctcaagatctgtcggggctggaatctgagctaagtttgtgacctgagaactttttcgtttatatcgctcctttaaagcagcagcctcctcttaagccggctggcattcagatggaaaccgaagcctttggttaaaatcaggaggtgaacctcacttacctgaaattctttaggtcaggcaatgacgcttttagttctaggaatcttcgtgtaataaagttctttttaaaaattttttcgttggtcatggtttagaaagtcatggtttagcactgttaattaaatgcatgaaagatctcacttatacatatttttagtatttttcacattatagaatttaaactttaagtaattccctcaagtttttaaaaaatttctcggccggacgcagtggctcacgcctgtaatcccagtactttgggaggccgaggcaggcggatcacgaggtcaggagatcgagaccatcctggctaacacggtgaaaccccgtctctactaaaaatacaaaaaattagccgggcgtggtggcgggcgcctgtagtcccagctactcgggaggctgaggcaggagaatggcgtgaacccaggaggcggagcttgcagtgagccgagattgcgccactgctctccagcctgggcgacaggctcaaaacaaaacaaaacaaaattctcaatgataatctctatgtgaaatagtgataaacaatattgtatagagtattctaactatattactaaatgggatcacaaaaaacctaatgtgcatggaagaaaataaaatataggattatctgagtatttgtttcatgcaaatacttagatttctgtattgtgacctcttcctttgacggtcacgatacagatataagttcttttctgaagtatgtaggtaaggtctgttctagtaaaaatggagaagataacagattgaatttgatgtctccatcacctagtgacccgtctgtgtgggttcagcaaaaagtgcaagatagtgctggttacctaggttacatacacaggtatatgagatcagccttagctctcttggagctgctaatgtagaacctgagaaacatcaataagcagcacttcctaagtttgagcttgggaagagttatttttcattgactagtatatgacgtcagtatccgtttttatgaagttttagttaaataaaaacactggcctaaaaagtacattctgacagtttaaaaaatactgaaagtacagtcaccaagtgaaggggaattaaaaaaaaaaaaaagggctgggtgcggtggctcacgcctgtaatcccagcactttggtaggccgaggcaggtggatcaccaggtcaagagttcgagaccagcctggccaatatggtgaaacccggtctctactaaaaatacaaaacaaaaaataaattagctgggcgtggtgtcgcgcgcctgtagtcccagctacttgggaggctgcggcagaagaatcttttgaacccaggaagcggaggttgcagtgagccgagattgtgccactgcactccagcctgagcgacagaagaagactccatctgaaaagaaactttgaccaagagatactttgataacagtacaggcagttgccatgatggggttattaggttccattctcaatactgctagattgaggctgtccttcctgatcttggggacctgttgaaaaagcactgggtgagacatcaactaggtttgctatgtgagatcaggaccatcttagtgactaatgtttgtgtgtacatctgctttagtatttacgaaattcgttcagaaacaagctaatacagttcctttcaatgagattttatgggctgtccggttcaatatctcgcagtgctgccctgagaggacctggtggtcatccatgagatgaagctcttaacttcgcagatgcttcccagtgcctcgttatagtctctttttaatttctgaaaaggtgctttaagatcactgatgaaagtgcattttgcgattaaacaataaaatatttatacatttcttaatgttatttgtgatacaatattttggtatttatttatacttgccttggatcacactgtgttgcatgaaagaaattgcatgattttcactcaatagtattatttcaataaataattgtagagaaaaaaagaaaaaatatttaaatttgagttttagtatattggtaatctttgttttcaaaaaggaactcccaaaagactagcattttgtggttgtagcatatattaaatattacataacctgaaactgtcaaaggatttttacctttaccgattgtgttgcttacttctgccatgtgtaggcaagctccaacctgttgagggtgtggattccagatcctctttcagaagaaactcccaaaagactagcattttgtggttgtagcatatattaaatattacataaccattagcatacttgaatcataaatatagtaaatattatcctttttcaccaccccactgccccttccccaaataaaaaaagagaaatactgttactgacttaggatgtgtttgtggcaggcctttgaggagagccagaatctgtggtagagggaacttcattatagtggatactattattctgtttgctgagggggctggatctttactattttgaaggagtgggtagggcacctgaagagatttagtgacataaccctactaaaagaatgtgcctgagaagaggataggacagttcttaaatgcttactctatttcctattgtttataacagaatacttgaatctgggtagcttaagaagaaaaggaatttattttttacagttatggagcccaagtccgaggttgaggggctgcatctggggagggctttcttgccggtggggactctacagagctccgaggtgatccaggacctcacatggtgagggagttgttcatgctagctcaggtttctcttcctgtgaaactatcagtctcattcccgtgattacccatgaatccattaacctattaatccatgaatggattaatcattcatgagggtagaggctcatgacccaatcgcctctaggtcctacctttcaatactgccacatccacattggaggtaaagtttcaacatgagttttagaggtggcagttattcaaaccatagcaaatatgttaaggttttctcatgggattatgttatcttcccctatagtgattgctagaataaaactctctgggagcaccaaattaccagcaaatgtttgggtgacacagcaaaattctttatacctcaagttggtgcccaacatggcaatgaggcaagttatatataagcccagagtactgaaaaggaaaattattttcctatgaaattcatatggtgaattagaatgggaagtagagattaaaatcccaaactcttgaggtgtactgatcgatgtaccatttgatgataacaataatgaagaatgtatgtttcacaaagtcttctcaactctaatgccccattctaataggaaatatgcttttaaaaattaaactgttcattaattggatagtatgtttaattgaaataatttttctttaaagaaaaatctttcttcctagctacttgggaggctgagatgggaggatcacttgagcccaggagttcgaggctgcagtgagctatggtcacaccactgcactccagcctgggcgacagagcaagatcctgcctcaaagtcttttttatgtgtatggtaaataaatgtatcccaaatttctatcatctcactttagtgtttcacaacttctagttatgtatagaagagtggcttgattagttgatgctgaagtcttgcagaaaagaatcaaactagaaagagaaatacaaggtattgtgcataggatagcaggaccattactattagtaaactctcacttataaattcatatgcatttagagaattgccgtaaaggaaaatccctgaacatacatctacataaatacttgcattttgaaattgcccagtacttttaacttttttttcaaagaattcaaatattttaatattttagtgtagtagaaatggacagtgatatagagctagtgtcttaccctcattttaggggtatggaaatggaaatactaaaggtaaaagacttgtctttcattttcaagtcattagtggtataccttaaatagaagattaacttaaattacacatttaatcctacttttatcccttgtgactccaaattcatattattaaagactctaacattttattttcctgttgtctactttattatcccttttactactcactactcctcatgaaccatcagctccctaaaatgcttatgtgcttcctagactaatgtaactggctatttacagaccccctttccgcagccccgtcctcttccacttctctctatctcttctcatgccttctgaggattccattgtggggccacttctaattcctgcaaagccctgggccgattgctcagttctcattagctggcttcaggatttttacctttactgattgtgttccttacttctgccatgtgtaggcaagttccagcctgttgagggtgtggattccagatcctctttcagatgcccagaagagtataaacctgctggaggaaaagtgttcagagagcctgttagagatcacaaagaagaagggaatgattttaatttggaaagagaagaaaagattattgaggcgatctgtttatttcttgaatggagtagtttgttcagtctttaattcagaataacatatgaaatttaatgtgtactgattaccactggatttccttctgtttgcttcagctcccttggaatattttgtaaacatgattttggtagtgttatcattaaatgttagtaaataagtcctgaaagaacagaatttgcccttcagtaatatgtagaagctatgaacaatactgacaaataagcataatttgctttggcattttatatttgggaatagttatacctattaggtaagtgtagtcttgttagagaaaatataacaaaagacatataggcagttggctttcaattacatatatgtgacatatccattgtagattatttatgttcatctgctttgtccaagacagagtcagaaagagtttgcaactgaatgtatgtgtctgcatgccaacccccaccttttgagttttatttctagacttaatagtttctctcctctcagtgcgaacgatagcagaataatcatatagaaatccccagtgtgtgtataaattagcattcatgctcttttagtagaaattgaataggtatacagtcagtttaagaagctgtcctttaaatctttccatttgaaatattcgtagagttttaaagttgtgtttgttgcttaagtcagggctttgcattttttatcatgcataacaataacaaacttagctactaaataataggcatttaatgcgtacaaacattataccgcaacaaagttgaatcagtacttcctaacttttaaaaaggaatttgtaaaggaaataggctcaccaagcttgtgggtctgtaatgtttttattgatgaagtacgaaggcaatatatcagccttattgttgctgtcaaatggctgttgcaagaaaaatgatgtttgttagcagttcctgaagtaggtagcaacattagtgttgtgtaagtttttttttgtaaaatgcagtaatctgcagatgatgtcgtgaatccatatacattgctcatttaaagaaataactgactagaaatggacacttgtttatagagtagtcctttagactggggtactgaaagggatttctagaatttttcagttttagaaatgagaaatgacagtttctgtcactgagaaaattgcctcagtgacaaatactcaggaatttcatgataaaaatcagtaggtcatttaaaaatactttacaccaaggtgcactcaatatccaacacggtgtagagcagtaatgaagaccaaggtacccgctgtaatacaaccttgtttaccttctagacagttctgactaaacttttattcttgaagctgtgctatttttgtcattttaatatatgtgaggacagactatatccaatgaatttctagaatttcacaaattctggggaaaaatcttttcctgggacctttgcagtttgatgatatcattccaggtggtatgaatgggggcaggctcaccaaccccatgggtaatcagacttgggccaactggattttggaatcacctgcagtgtttacatttctcccaaggagggtagggacctgtcaggaaggaaaaaagtagcctgaaagggaacgttgaacagctgttttccatcttccctgaagaaaagaagggggaaattaacttaaagcaagcatcaagaaggatttatggtaaatacagggaagtttttctgaatgcttttatcctttaggatggatttctgaaaaaggcctttgaattcttttctgtttagaaaggtttaaatggggttgccttgaagggatgttaaatttatcttctggggctctaatttatgacttctgcttatttaaagttgaaaatcttagaaattagaaatgatttaaatatgtgaatatagaagaaaatattttaatgttttacatagaagatgcctttacattttctacttggtatttttataagaacaaagtatttattgactggttaaatattgatcatatataagatcaatctttcattgaggtaaacattgcaaaactcctccatcccctgcttaatctgttttctcccaaacaggtcatttttcctccatatttctcttttttatttttaaaaattttgaagaaacatttaattaataaatatctatattccaggtatacaacctaagtatttgatattcatatgcatcatgtagtgattgtcacaatcaaattaattaacacatccatcaccaccttactgtaccttaagtccccacccacatttcttttttattctagataaccttgttttttttaagtcttgtcttttaccattctctacatcattttctatggtagaaccagactggtagtgagagggaaaggatctcagtggttgcatgaatgtagggggcattcatcagtcatgtgattaaaatatgggtgttgcccatgtaggaaagaacctggaaacttctgtcataccatgcttcttattgcagtgtttatggttaaaaacaataatggtgtttttataaatagaatgctaactttattttattttgttaagaagatgcaatctccagcagaattgatcccatggttttaggcctgtggttctgtttttttctcaatatcaagattaggcttattgaaattaagatagaagtatcttaaaagcaagatcattttgatgcagcataaggtgttggaaaatgcactctgagctgataatgggtcagtgggcttgaaggatgccaagaaatggagctcagcaaagttaatgtcttaggcatttcgagttctgtttcaggttagtcttatagactatagttttaaagcaatttcaaaatacttttcaaaattacctttctcaaaagaaactgattcttgggaacattgaaaacctccaaagttatcttaggtaagaatgtcttttgctggcccctttagtttccagattactcctagttctcttcctcctctatctttactttaattcttccgtaagttagagcttttggttttaatgagaacccaagagaaatagggagcaaaacaggaattgatctgttgctgttatgcaagttcagtttattccttcttaaactattttgtgaaaatttaagatccacctttttttctaaggaaacaagtactgttcagggtggattcatcccattatctatgtgctttgttacagtcccaagatattcaccattaaaatttttagacttcatgtggcttgcatagaattattctgtgtaaaatttaaattaagaaatgtcatttgaatgtctgctgtggtaactttaaaagttgaatttcatctcaacttgttaaatttcatcttgcaaatttcagattgttggaccacttccaatatctctttcttaagaaaggttatgtatggcagtatttagactacaaattgccataaaatcataaaccctgcacataaggaagtggagttagtggtgttagggtggttatattacagatcctagggtggttatattacagatccttctttatgtgcttacacctttttttcttgttggtgaagccactgatgtttggttcagtgattgcaagttttagaaaagataaatctgtgttacttgggaatgaatgttttaatatataacttttcccaatgtacttttgaacttggagagtcagatgaaaggatattttactttagtgatagacatactgaaaggatttagtcattgagtaagtatttgccaggtacttctgtgtttgaggggatgtctaggtggagggaagaggggaaggcatgcaaaataaatataacatagtttccagccttgaggagctataaaatctggttggagaagaataactgaatatgaaactttgtgagaacaattaggtgccgaatggacataaatgcagtaggattgcaggaaggaagaggttccaagggcagaagagggggaatgaattgggtctcagaggattttatacaaaaaagaggaaaggagaaagcactacaagcagatcagccagcagagcaaaggcacaagaagaggagcaagcagatatggagcagctgccaggtcaaggagaacttcagggaaaagtcatgggaattcacttatctccattgatgacattctctttttctccttcctttctttgtatattctttattattttccacaagggtgtttgacactacaagaaagacaaagaagtctcagaccctgcctcccagcagtttatacctgagttggtgatcaaatcccttttggatacagagaggactgaaataataaatgtgagacaggaagataacatgtatattcacataactcagtatgcacatagttagtactaagtgtatagcagagacagtgaaatctgtacacattcttaccgacccttttttaatgcccaattcagatactacctcctcagtgcatccttccttcttcaccttagccagaagtgtcagctcttctgtaaatttcagttgtactttgtcattcttatgcaaacttcattttattttagtgtttgtataaatatttattctatcattttataagatgatataagcaccttcatggctggcaccgtccctgaattctcaaagaatattgagcaatgcatacatgggttcccaggggagattgcttatggatggagttgccaagaaggcttcattaaagagtgttgtgttctttgaatgaggaaagtaccacgttggatgtggagcagataagagagagtaacatagggaataaaggaatgaaatgtgagtcatgctcaagcaatgatgggcaggtaagtctgaagggggagtttatgtagagaggaaacgagggatgagattgagaagataggccagagctagattatgaaagctcttggacaagactgttgctcattttgctgagggaaatacaggctcttgagtagggaaatgatatgaaaatggtgactttatgatttgtaaagatagttatttcctgggtaatttgatcagactgcctgcatttatgtcttggcttcttcacattctatgggaccttgggtagcttaattgttctgtgcctcaggttctatcacctcaaaaggtgaagatacaaattatacaagtaactgcattatggggctgtggtaaggattaaataagtcaatctacgtgaaatatgtagcgtagttcttggcacttggcaagcacaataaaggcactttattgttcattggtgtagatactgtaagaattacaatgtttactttagaaatgagaaaattctagagctaggactctattagttatctgctgtaacaaagtactgcagacaaggtggcttaaacaatagtttattgtcttacagtggtggaggctagaagtctaaaatctaaaaatctgtcagcagactgtttccttttgaggctatgaaggagaacctgtaccaagccttttaccaagtttctggtggcttctaccaatctttggcatgctcatcttgtagatgcttcactccaatctctattttcatcttcacatggcattctgtgtgtgtgtgtgtgtgtgtgtgtgtgtgtgtgtctccaaatttccactctttataaagacactggtcatattggagtaggggtctgccctattccaatatgacctcatcttaactaattaaatctgcatgaccctctttccaaataaggtcccatttagaggtttgggggttaggacttcaacatatgaatttttgtggaacaaaatttaacctttaacagactgtaagtcagatatttcgagcctaccataacatggccatgatatgccaaaaggattgtagaaaagaggaggaatctgtaggtttatatgataatcagttaatgaacttgttgtctcttctgtctcctttctgcctgggcctacaccattcccctacgtagccacattaatggacattgccataaagggctttgggattttgctgtgccccctgtttcctgaaaagatattttgttttcttccttctttccagcatgacattccctgtgacttatttctgtctaggattagagataaggatattaagataaatgagacattatgcttataccacatagtttctgtcttctctaaatttgggtgatatgtcactgtccaaatgtataggtgacaaaggaagaaatgaatgcttgtggaaaggggcaaaaactcttgaagtgtcaatggtaaggattttactgaggagtcagttggagatgataagtgagtaggtatgcagctgtgtggcaagagagaaatttttccccgccctacccccaggcttatggtgggaattgaggtaagtgaacaaataggatcaagtttccttaagtcactgagaaagttagaaatatccccagagtgatagaaattaccagtgaaggtttaaaagagtatatggacaaatggtgatttcaaatgataaaagtgccaggagagtcacacctagagtcatttagagaactaggctgtctcaggaattgaagaggctgcctccatgttgcttgtgaattggtaggatgtgagatttggcctgcatgggagagcacaactggagacaagttgttattgaaagactcagttgtttcataaaatctgtaatttggaaggatcttaggtgttccccaaccccaccttatttaaattctgaatcacctgacaggtgatcatctagtttctgcattcatttagggctagacataagaagagagtttgaaaaataagtttactacaaaagggagttttttttccagcatagacaaacaggaattccattaggtttgatcaaaagagaagtagctagggggactcaggctgtgaatagacatggggtaaaaatgggtagggtgggtatgaaagtttgggtggagaagtatacaagcgagagagaagtatatgcctagattaggagatgccaagaatggggctaacactatgagagcagtttgctaagacagaatgaaataaggacaacttactcacctagataaggatatagactccgcattaaacattcatgaacttgtgcatgcacacagacatgggcattaaatatctggccatatttcaggccctcggagtttttaatttttttaaataatcatacctattaagcacctttcatatgccagtcattgctctgggcacctttctcatattatcattcatcttccttacagtcctgggagatagatatttctatccccaatttacagatgtggaactgagttggaatatttctgcagcagcatgttatttgtcctgtgtatccatggccagcaattcagaaattattctcttgttctacataatatatgtagtctccagcagtctactagagctttacttttcctcaaaaattatttcctgactggtaacatttcatagacttaaatatacaccatattaagttttttttagcaggaaatactagcaattgtgtagatgtagaagaaataataattacagagtattcttttgaattctctagataaaagttaatagtacagaaagattgtttaaatttacaaatagtaacactaatcaagtccttataccaaaccattaaataataattacaatccttgggcatgtgattagacatggggacatgagggaatcactttaaatttcaaaacagagcaacctaaataaaagtcagcacagaaacagtcattcagcagaaaggaaggcttggctggtctggacatggatagactagggagagtgtgaggtgcctaatcccatgcaagatgggccgaaaattttgagatggcatttagaaaaagacccatagaggactcatgaaatctatccttggaatgtcaggaaataatgagagacattcaggcagtggtctgcgattagaggcatgttagttaggcatgctaataatgggatggcgaaagttgggggtaaagcaagtcacctagacctagcagcctgaggtggacttagtgggagctttgtgccttgggggaggctgggaaggcactggccgtgatcacggctctcagtaaactctgtgataatcactcagagtaacctttagagttcaaacattgtagtacattttatctccatatgatttgtcttcctacacaaatttttattgtttcttttaatgtaattatatttatgtagctgtataactatatgtttagttatctctgaggatttaaaagtttacctcttgacgcagttaaatttatccaactaatatatattttttaagtgtttactaagtgctaggtacacttttatgtgctggagatatagcagaaagcaaagtgccctcctgaagcttacattctagatgggagagccaagcacacaaaataaataagtaaattatatagtagattagaaggtcataagtgccatgaagagaaataaaacccaggagggaattagagaatggtaatggttggacttggtaatgatgtcatttaaataaggtagtcattgcagacctcactgagagagtgacatttgagcaaaaatttaaaggggatgagggagcaagccacatggatatcctagggtaggcatttggggcagagggaacaaatgtgcaggcgctgaggagggagctcacctcatgtatacaggaataatagaggccaacatggctggagcagagagagactggacagtcggacatgaaggcagagaggcagtatggccaggctgcttagccccttgagagcaatgcttaggagtttgatgcttatctgaatgaggtgggaagccattagagtgttttaaatagagtggtgacatactctgaattaggattgaacaggatcactctggcttctatgtggagaatgatcttagggaggtaagagtgaaggcaggtagacaaatttggaggctgtcgcaggcaagacatggtatggctgtatggtggtggtaaaagtggctggattctggacggatttggagtagagccaacagaatatgctgatagtttggatatggagagtgaaatagggaagggagaaaaggagggggtggggttgagtccaattactggcaggattagttgccagtaactgagttggggaagtctaagaaggcagtgcctacgtctttgggttaactacatctatgtatcattgttttacaaaccaagtctgtggtattctgagttgattatgattcacaggaggacatttgaaaagtatgctgggattttaatgccaaagaactcaaaggttttcatctgtgtgataaaagtgagaatcaaaataagtacatataaaaatgtttggaaatgttaaagacagcaaaaaaaaaaaaaaagtaaattttatcactgatgagtacttgaagtctggaaaaatgaggaatgcttgtatataagtaaagaatgtaaaagaacttcatgtgtagtaataaaagcaccactccatatatactcatccaatatatacaatttttatttcaatcagatgtactgcagttacaggtttaatgcccataaattactttccaatgaacttccttttagccctttgcttaccatctgtatgtttcatttttggaatattcccaaagccttttaaaaaatgtgtcagtccagtgtattctgctttgtcctttgcttcaacagcaacattcttagtcatttttctgggtgtaagtcagagaaaaatagcaaaagttgactaaagagaaagatgtggtgaaagtatcacattttcttttataatgggacaaagtattatggcaagctactcataattctaacaggaacttagatgatttaactaaaaagaagataaagggcatatggatggggaagcagtccccaagaccaccatcagccttggcaattcactagaaggacttacaacatttgttatcatctggttatgctttatttaacacagccaaaggatacagattaaacttagcaaagggcaaaggcacatggggcaaagcccaggagaaaacaggcataagcttctaggtgtccactcctactgaagttgtactcaaaacaacaatgtgtgccaatacatgcaaagcgttgctagccagggaagctcacctgagccttggtgtcctgggcttttattgtagttagatgtgactgacttcagctactcagactccagcctctccagagcaaagataggagtttatcatgagtcatctagttaactaaagtgttactgccatgtaacccaaggcctcgagtgtataaaaacctctttatcaggcagaatattccaagggctcgtctctcatgagctggtaaagggccagtcctgaagacttctcttgggaatgtgtatggtttgagcaattcaggtctgctaatataaccctttcccatttaacatagtagatccttgaacattgtattagtgcttcttagaggcattattactattagagagtaaacttatagtatcttatcctagaagatatgatataaggacataccaaaaatacacataatgtcaagaacggtttagctaaattcataaatgagtgaaccagattagattgcataagtgaggttagtagtactttttttgtggggcgcttcccctgaaaatctgtaatcagtgtcatgactcacccataggagtttgcagacaaagggctagaggaacagagaaactaacccacaagtatatgtgatatttattgggttcaggaaaaaggtcaaaaggaggaaagttaccctggaggttgatgttgaattctggaatagtctcaggaatctgttgaaaaactgcagagtaatgaaacagtacttaggaaaaaaaagcatgactttggtgagaaaattggaatgaaagaaaaaggatagggaagaaatgaagatgatttccaaataattggtttgagaaaatgtagtgaagaagttaagaaagttctgattggaagaatttagttttaggtgtataaatgagcaccttagacggcaggttatgaggaaggaggtgggagtgagcaaatgaccacgtgcagccatgcagccatattcttgtgggaagtcccaggattgagacactgcaggcagcttgcagggagaaaggaagtgaggcataatggctaaaatcttgactgtgactcagacacacctgaagtcaaaaataaacctgaccactcactgaataatgctgggtaggttatttcaccattctaaatctcactttcctcatctatttccaacaaaattacccataaaataattttggggattaaatatgataatgaaatacacgttctttgcacagtaaaagcagtaaaaattttctgggaaaaaagcataagaaggattttccacagaggtattaagagaagcaggagaatacggtatcccagaaactaatttcccaaagtgtcagggaagaggaagagtgtggtgtattatcctaggtggggagattctggagagtgagtactaggaaagggatactgggtttttctaatgggaatttgaaaaagggcttggcctgagcagctttaattagtatattagggttctccagagaaacagaaccagtagatccatgtctacacctacatctgtttatctatctatatctagaattggctagattatgggaattggccattatgggaatgggcttttgtaatttggaggctgagaggtcccacaatctgccatttgcactctggagacccaggaaaacaggtggaataggtccagcctgaatataaaggcctgagaactaggaccactgttggtgtaaatcccaggcaaaggacaggagaagaccaatgttccagcccaagcagttaggccgagagaaaatcttccctctctttttgttctgtttgggcccacccacattgggaggacagtctgctttactcagtttagtctcttctggaaacaccctcatagacacatccagaaatgatgtttgaccaaatacttgtgtaccctgtgattctgtcaagttgacacaaaactatcacaactggtaagaaaagaagtcacatatgtaaacatcaaagggggagaattggtgatacagaattaaagatatttaatttacagattcaaggagttacattgccagttgaaagataatatacattggcatttgtggaaagtggaaaatgtattttgattaaacatcaaaattttaaaaaattatatttaagtttataagtaatttttttcatctgttgcatttcatcaggacttatatttctgcatttaggattttttgtgactgtgtaagcatgtttttattagtatggtgaatcagttagctttatctgtatatagactttggttgatgaagaagtagattggtaattgcttttttcctcagatctgtttggttacttggaatatttagctgaaagttataaatgtgcagttgagcaggaagaagaagaaaacttttggcatcaaatattctatatttctcaaaatatttgatatttttagtctcctgaagagactgcaaggttgagaataaacaatgcattgtacatattttaaaaatagcattctctgagtgatagttttgtgagcgtttcctcctggggtcatggtgcacttcccctcagttggactgacctcgatgttctcattgagaagatgatgatggctgctagtatttattgagcactttctaaatcctaggcaccattttaatgctttaagtatatcagctaatttaagcttcacagaaaccctatgagggaggtactattatttgatccattttacagaggaggaaacaggaacgtaggtaaggatgtgatgatgctaggattcaaacccaggaagtgtggctccagcttgcaccctcaaacactgatagtgttttgaggtgaatgataactagcttttttttttttaaacacttactatgaagtgagggctttaaaggtgctacctcatttaatctcccaaccagtcagtgagacaaatagcattttattttaaatgaagaaataggtttagatagcttgtccaaagtcatacagtgacaaacaactgtgaccccatgccagccctcttaaccatctcaccagtctgccttcaggaatgtattgcaggaagaaaaattttactttggttttcaggagcattttgtggtttagtttaactgttatttgaaactgtatagggttgagatttagctgttggcttcattatttttattcatcctcttttctatactttattttttagtcagtaatgctacaaaagtgttttcatggttaaagctattgctgagagagccatagcttgtccttcagaccattacagaaaatcttttactctttagagaaagtttttaaaaatatattgcaaattttctttagtggccaagttcaataggttaaataaattgttttggactaagggagactgactattcatctttattttcaggcagagtaatacagtactacagttttttaaaaaaaaaaacctcagagacatcattttcttatatttttgtttatagttatttagggaaggtatagattttcttgcccactttgtattttcaatgcctaacatagttccaggattttattttattttattattttttttttgagactgtcacccagactggagtgcagtggggtgatcttggctcactgcaacttctgccacccagcttcaagcgatcctcccacctcagcctcccaagtagctgggaccccaggtacatgccacaacacccaaataatttttgtatttttttgtagagacagggtttcaccatgttgcccaggctggtctccaactcctgggctcaagtgctgcaactgcctcagcctcccaactgctgggataacaggcatgagccactgtgcctggcccataattcctggatttaatactttttcaatacatagtagaatttattggtatttataagaaattcttatccccaacttgggtaaggaattgatattccagtactggatcacaatgcactgcaaagcataacaggcaaaaattactactttttaagtgattcagcataaaaaatacacttaattatgctcaatattaacttctgaaaataatattaaaataaaaaattctgaaaataatttagaatagtgtattctaaaaccatcattaagaaaatcaactaaaattgtaataaagaaatactaatcagaagatcttcaattgttagactgctagataagctagaatttatttatagcttatcttagaaagtgtaaccgtttcattttctcttttggccttctgtaagcaaaattagatgccccagtactctcataagtgacgtttgtacactcgtatctctaccctcgtttccctttgcctccatgaaaataatacagattttactttttttctacatatgaaatgataaccaatctctgaaaagctggatactaatggtttgtagtttagtagtaacatgcaccaggctaacctctaccactaaattatgaatttagttagatagccactacatttctcactcaggtggtctctggtggatgggggaggaacccttcagacttgacatcagaaaatgtttgtgagcactttaaacatattttacatgaattattctaatataaggaagttatacaattatcatcactggtataacaaagaaagtgggcttcacattatataatgaaaaagtgtgctgtcttcatgaaaacctttcaggggacaatgatagaaatgttctttgactgtacagagctgcagttaataaaagcctgacctaaagtttttttttaatgttgtattttaaggtggtgaacaccgttattatacatggtgtggttttgctgtgtggcctcaggtttctaattactccttcagcagcgtgtgcaaattcttggaggttccatatactatcatttcatattgtggatttttgtttggaaattaccttttagggagcaaaagtattcttgattttgattaagagctctcggttttggccaggcactgtggctcacgcctgtaatcccagcacttagggaggctgaggcgggcggatcacgaggtcaggagatcgagaccatcctggctaacatggtgaaaccccgtctctactaaaaatacaaaaaattagctgggcgtggtggcgggtgcctgtagtcccactgcttgggaggctgaggcaggagaatggcatgaacctaggaggtggagcttgcagtgagccaagattgctccactgcactccagcctgggcaacagagcgagactccgtcttaaaaaaaaaaaaaaaaaaaaggagctctcagttttaagattttcctttttgtctgagtccacgggctttacacatcagggagtataattttagggaacgattctgcagtaccaaagccataggttttcttaggatttgacatatttaagaataaggttagatttatttcactacaaaaatttaccaaggacatgtaaggttttactttggtattgaggaaacattcttcaaaaaattattttaattatgcatttaataaaactgaaatagaaaagtgaggagaccttttaaaatatatgcattttattactatagttaaaatatgtagcaacagtgaaatagtatgtgagaccacagcaaggtgttccccaaagcacttggaaggtttctctgagagttaaatcctaaaatggatcagagaaggcaatgcagccctgtctagtatatcctaatgctctcaggcaatcagggttttcctaaaacttcaatggaggcctgaaggaggagggaacttggacttaaatggaagcatgagcaagcgagtcacagtgcctaacctcggcaacatctgtctgttttccacgggagagggtgcaacgtcaggaacattcatttgtcgggtctgcctgttcaatcttgccatggatatgggcacactggttctagtgtgggggattattcctaatcatgtaactaactatggggcccatccattaagttgagcaaactggagcagctgctcttaggctgagcttggcgggtgtggtggcaggagctataggggatgtacatttcactcttgttttctaaatatgattacaactcagtttttaaaattttgtctttaatgatacccccaaggacatctgtgacagctgctggcaatttcagcagcctccttcaaatgaagttatggtagcgatcttaactggtcaagttgccccaagttcagggcctttcccattgcctttgttctgattctttacttgttcaccagacagttatctaataattcacttcctgtgttggtttcctgtgaagtcagaaaatatttcccaatctgcttgacggtaaacgaatatgctgacattctggtttttcatatgtgagaggtagggaagcctaacattaagtagcatctcatctccaggatgatcagctgagatactgatggcagtgatggagccaggaccagaccctgtactgaggttaacctatccgccttgcagtggcagcaggtgtcccctaaattttaatgtactccttccgtaatataaatgtgttactaagaaacagctttccagccagggactgtgtttcccagtcgctgttagatcggcaggcctttctcctgacagaataaaggagaaaaaagaagtggtcgccttttgtatatgaagaattaaattactgaccctaggaagaaaatttagttaatagctcatttaatctattattcttttctttggggcaaaacctctaacaaacacttgaaaaatttaaagggtcgtatactttcctttccagtgagtgatgagcttactatgagtgatgtgttgaagagtgagaagcattgtgttccaatttcaactaagtctctaataagcagtatgatctggccctagtcagttaacatctatagttcttatatttttacctgtaaagtatgaagatttagtttctttcaaataaaatattttatcaataggttagtataatcttgcaggtctgaaacatcttcctttttataaatattattgagctcttcatgtcatgttctatgctaagtgcatcacacatgtctaatcaccccatgaagcatatttcattttgtggatgacagaagggaggttttgagagtggacgtcagttgatcaaagctaggaggcagcagagctgagatttatgctcttgtctgcccaactccatgccccatactgttaatcattatgttgtgttcctcaaatttggcacatattataagagggttttttaatccatcttagtttggggcatgttttactctctacagggtgatttctttctcccatccttatactttctctgttttctgaagcctgtggaattgaaagaacttttgtactaccatttgtttcattctataaacagtcccagatcatttgaaacccaaatcttttttgaaacttgatgtactagtttagtgttcagttttttcttctcagcatattcttctgtgctttctttgtgtaaggatggcaaaaaaatggaacttttaatgttattgaacattctcacaaattagtttggttaaaggaaagaatcttggcttaggatttaggaggtgcaagttctagttctttctctgaaatttattgtggaacaaataatactattttgctatattaagttattgaagagtaaaagatcaaatatgtgaaaagcatttaggatcacagaaacgaagtttttctgtgtgactgctgaatcataatagctgcagtggattgttggaaccagaattacagcaaaataatttggggcctatctttgctttataaagatctgcttaaggtaattgtaattcataattcacgtggcttggcctacacgtaatgctaaacttggactgctgaatatatacaggcagagagatgatcaaattgctatctgaattatagcagtaacagcgtgattttttttttttttaaagacaaggtctcactgtgtcacccaggctagagtgcagtggcacaattatagctcactgcagcgtcgaactcctgagctcaagcaatcctcctgcctcagcctcccgagtagctggaactacaggcacatgccaccacatctggctaatttttttattattttattttatttttgtggatatggagtctcactatgttgaccaggctggtctcaaactcctgacctcaactgatcctcctacctcatagatttaagaatgttttactatccaagttgtgtgacataagacaaatgaatgggaagaaaaagtggatcatgaaagttgtagagttaaaagaggaaaaagagaatttcaggggacatgatgctcaatggaatcattcagaaacagcctgagaattgagttgtagataaagtacttattagtagcatcagctgctgagagtcgctggtaattttgccatgttgaaaatgctatgctcttgaactgggcgaagtgcaacttaaagatttaaagggcctgggagtgctctgctgtttttgaaacacaatgaagtagggggtgaatagcttgagagatcatgcacaaacatcttgaagttcagacttatttctccaggacagaaggcacattttgagatagtgtgtgtgtttgtgtttgtttcatagtgttgaaagtgggagggttggctgggcgcggtggcgcacgcctgtaatcccagcactttgggaggccgaggcgggtggatcacgaggtcaagagagcgagaccatcctggctaacagggtgaaaccccatctctactaaaaatacaaaatattagctgggcatggtggtgggtgcctgtagtcccagctactggggaggctgaggcaggagaatggcgtgaacccaggaggcagagcttgcagtgagccgagatcgggccactgcactccagcctgggcgacagagcgagactccgtctaaaaaataaagaaagtgggagggttggggctgaccattcccataaactcattagcttttaatgccctttgtttcggtaagcatttttggcatctctcaaactatagttattcaggtaccaccttcaacaatttttgccatatccatttactttttttttacttttaaatttaaatatattttaaacaggagttttgcatatctgtagaaatctcaggtttgatgtggtatagtttttcataatgcacattaaaataagtacgtaaaattaacgtaaagcctgtccatttttggtccacctaaaattatcttgaaacactcttttcatttaattttggctcttctctttgtacaatgagcacacacaatgtctagagtggaaggtcaaagagaaaactcaatgactggaaatagagatttttcagtgaaattttctagacagatttaaaatgatgggtgggtattacttcctcttttaggttatcagcctaaaacaagtttggtttagattttagttagatttaatttcttttctttttaaactagtggatagtttttaggctacataagtttctaggcttcatacgtgttttctcccattagtttcctagagggactttttttctggaaagttccacactttccttggcttcaaataagggggaacaaagtttctccatgcttattttattgatgaggtctgctctaccaacagctaagcccagggatttggttcagcacagccagcatgctgccttttaaaagccagattcagtgctaagctccatgatacatagaggaagaaggttctcaccttctgtgaggcattgcatgtaaacaaccgaaacagtccggtgtgatataggtatgtgccagatacaagagagatcaactctttgggtgaatcaacaaaagccttaatagctgggagagcactgggggctgagcacactgagtggggcatggggaaggtagtacaccatttgtggtattgagaatgccacggttctttctcctcagtcttcatagatgattgttctgcagaatctctatgggttctgcattggctaacgtggtgttctgacggaaattaatattttaaatgtacagtaatgcacaaccttgctgctctgactcccttgcacgaattcaaagtaatagctagagaaccttcaataacagttggcatgttgagatggcatccttcccaaaacaacatcttaatgaggttctatgcttcaggatcagcttttctggtttaaatatattcagacatatcctacgtaactggaagcaatgtggcagaagtggcaggggtcacattgtgagttttgctgagttaggcatgtaggccccacagtgtgagggactcttcggagcagtcctgaatatacagtgattctgtgcctgggtgggagtgtggttgcataggggaggacaaagaacatgatgaattaaccttacccacgtttggggaagtttgtacagaatgtgagatggaaaaattctagtttccatgtattaatgccttcttacccatatgctcatagctggagccactcccctatccacctgagctcccacacattcaaaagctggtagttgagggatctttcactgcatgtacgttgggtgtgtgtatgggggttcagttaaaggagaaagtgtctaaaacccccacaatgctgattgcattgatgagagcattcagacttagacttttagggacttaatatatacaggatttttttttaatcgttagcggtatattattctctttctttcttttttttttttttttttttgagatagagtttctctctgtcacccagcctggagtgcagtggtggatcttggctcactgcaacctccgcctcccaggttcaagcgattcctgcctcaacctcccgagtagatgggaatacaggcaccccccaccacacctggctaatttttgtatttttagtagagatggggtttcgccattttggccaggatggtcttcaactcctgacctcaaggggcccgcccgcctccgcctcccaaagtcctgggattacaggcatgagccaccgtgcctggccggtatattgttctctaaatggagcaaggaataagcccctggggggactgagcattacctcagacccagccatttctgtgtgctgccagagaccacacccctcctcaggcataaccacagaagactatttcttttggctgggtctctgaccttgaaggatccagcctgccagctgccttgagactttgggtgctagacataatactggcagagtccaagagttatttctatttcatatgttttatttagtatggctatattaattttttattcatcagaagttctgctgttgaaataaatgtaaaatgttttacaaaaccaaaaccactgccatcgagtttcatatataggtagaaatataaaaaactccagaataaggtagcaccctcaaatgatgtctcattgcctttttcttggaaacacacacagcaagttgaaaatgtggattgatctgccatatctgttaaattattagtttttcttcttctaaatatgatgaggcagtttttccttggaaaaacagtttgtgttcagcttgggaggttgattttccaccatcagtttctccctttaataattgaaaaccactgttcgttatttacataaaactgtctttttctggtctgctttctataacctttcccctcttaagaattttaagaattccctgactttcctctgagggattttctgcctgctttatcccagatgtgggacattgactaggctgaggttttggggattttattttattttttttagtgtttctacatttgaaagatgttcttttaaccagtgcacaaatctgccactgaaaaaaggggctttgaagaaaaatcaagtagttaagaaaatatgtgaactttgtttacatttctcacttactgaatgacaccaaaatcccatatgccaaatgaaaaagtagacagtagtttcagataataaggggaaaatgcacccgtgttatttcagccttttaattctgggattttattctctgaatgaaggcatgtcagtttctggtcccagtggcactgtgtttggtcttcactacatgcttgctgatgtcagcccaggaaatacacgggcttggcagatgtttacatggcctttgtcttctctctttccaccttctgctcacataaagaggatatttaaccttattcataatattttgtctgcttacagatgtattgatcctaatccctggttcagaaatgttaggaaaaggagataagttacagtgaaagaggctgtagtaagaaatacaggattttctggttttttgtaatgtctactcagattcccagatgattgttcattaccagcttttggttattgtggtttatgtattaatgtctaaaaaaatataccatgtgatgttttttgcatgatactatgtgagaagaataccaagaataattttttccttacttgaacaaatattatacattttcccttagtccaaaattctgttttccataatgaatacaattctgatgtagtatgtttaactctataaaatcagaactttagtaattttcttcctaattaaatttttttgttgtatttttaaaaatctaaattcataagctttattttcacatatggtttctacctcttatatgtttccacacctgtgccatgttcccttggctgacagacactttttttcctttttatctcacgtaggatctttcgaagatggtttggctgccttggagatttggagatctgatgccacgatgaggactcacacacggggggctcccagtgtgtttttcatatatttgctttgctttgtgtcagcctacatcaccgacgagaacccagaagttatgattcccttcaccaatgccaactacgacagccatcccatgctgtacttctccagggcagaagtggcggagctgcagctcagggctgccagctcgcacgagcacattgcagcccgcctcacggaggctgtgcacacgatgctgtccagccccttggaatacctccctccctgggatcccaaggactacagtgcccgctggaatgaaatttttggaaacaacttgggtgccttggcaatgttctgtgtgctgtatcctgagaacattgaagcccgagacatggccaaagactacatggagaggatggcagcgcagcctagttggtagatttttgtcttgttcttcttactgtggtaactctgcattagaaagaaacaaatccatatgacatctcagtggccagatcttcatgtacctctttgtgtatgtgtgtggggggaggtgttatttgttatttgtgttgccagtcttatgaatggcccttagtttcaaaagatgtagtaacttccatgtttaaagttagaaggaaaatatttagatgcagcctaatctaaagaaaaaataatttgctgaattgagtaaagagtatcatcgtgattgctgagaattctttcttccatattcagcatgtatatattactatcatctggtgttaggtttgattgatcccaagtagttaaaacattttgcagcaagacatttcaagtaattaagacttacttgcattttatgatcgtaaggaactaaatgtgaatgggatgggactgactggcaatttataaacacatcccctccaataaccagcagatttctgagacctgtaggaaaaccaacattattgtgtaattgtgtgaggaattctaactacataataatttagtttcgaagtttaagatttgagaacaaattcctgtcttttcgattagcttaaatttatttgattaatttataattaatgcttcatatgcttccaaacagatatgggatgagttgattaaacaagggattctacagatgtttttactcatgcaatttttaaatacacatttatggttcaattgcaataaaagaatttacagattgatgaaatttttttaaaaaattacataagctgcctcttgtcatagggctagagagagctcattttaaatgcttagaaaaaaatcagtgaatgcacctaatgctatgatgaattacatcttaacatatcacaggggtgaaggatggtggtttgcaagctttccgataaatttctggaattttgtaatgaaaagtattatgcaagagttggcattaaatccatatcagagctgatattttaggcctgttgctaagtacatgtagtcattttgaagtttataatattgtaggttgaaaagaattttttatttgatttatttcaaagcttagccatgtatgtagttgtttctgactttgactgacattaactgatcttattctattcttgacaccaagaaagaaaagatgtatgaaaacttatctgatatttgaattaccagattacattatcaaatgctacagtaactcactgattgatttgttcaattagtttaaaatagcaaccatatttacattatttagaaagaaacctttgtcatctagaagggtactttaaagtcctttttgttttagataagtagattttggcaaattaagaaattgatgtaaatgttccagagatagagcctgtagagaaccgtgtatttaatctcacaagaaagtaatggactgtgaaataccatttttgatggagattgtttagcacaatacagtaacatgagaattgtacaagactagtacagttttctcattataatgtaaaatatttgggtatataaataccaatgaatgaatgctgccattaggatgagactccttctatgaaaagagaaataaataacttgaaagaaatattataatttttacatagtttccacaagtccagatttattgatcactggaggtgtatagaaacttactaggggtctagtactttattcatggcaatattgatagaaataggtataactctaggccattatctagtaaactaaaagccaatttttgacttaatagagctgaacagttgacttctttctcttgaccttcaaggtaaaatcttgagaatttacctttacatctggtttctagttgcaaaagtgaacttggcttagaaagttgagctacttgaacattttgttttggcaggtactattattaagttgtgttgtttaataacttcacagaaattttaacttcttaaaaactaccacacccaacccttagacttttaaactttcatttagatttgtggttgaacacaattacaacacaattatgtgctgtaataatttaaaacaatgttcagtgattttacagttcaactacctctgtttcaattgctccattaaatcatattctcactatgtaccaagaagtacacaatgagtattgtcattgacttaggatataattcacctatatttgatttcagaaaaaacaaaaacaaaaaactagctgttacttacaaaagagatcaataattgatattatgaaagtaaaaaaaaaaaaactttctacaatagcttcatcaggctgaatgcattttccattttctttgaagagcatttttactcttttgaaagccagttactaagttatgttcattcactgattcatttgatcaacaaacgtttattgagcatctactgtgtatcatgcactgtgctagggtgctggggattcaaagttgaagaaatagcccagtaattttataatttttacctatggcaaagggtacaaacattgggttcttaaagcctaagctaaggatattttctctgctcagaattgagtgtgtggatcatttcataaggagtttccttagttttcattcatgacttaaacatttgtatcatgctgcaccctagtgtggtagaaaagcaccaactctggagtcacactgcctttgaatcccagctccctcactcttcagctatgttaattttcttaattaactttccagattaattttcttaatttgcgtgagcattagtgtcctgatgtataatgtggcagtaacaaccctatctaccttatagggttgctaggaagattaagtgcaataatcaatgtaaagtacttagcacagttcttgtctcatagtaagccctcagtaaatgagaataatgacaataatggtaattattgatgctgttcttttacctacctagtaattagaccctgtttggtttataatttggtatatgtaggctccaaggaaatagtatccatttaggattttactaatcttaattgctctcaaaactagaacatctgtttaactcataaaattttccccttggctttttccattaaaacgttcattgatgctcccctgggccctttttaaaatgtatacaagaatctaatgttaacaccaatgaagaaggtttagtggaaagtaacaatgatgtgtcatttgtctggtattaaaaagaagtgcctatgagatatacatgcatacaaatttattaatggggttcatttcatttgaatagtaaataaagaggttaaagttcacctctatagattcacttaagaattctgaagcagaaacgttaaagggaaaatattcaattgtactctgtccatctaatagcctacaaagtagaacgggaatctcatagatttataattataatggtgattgaaaaataacagcatgcatttttattgtgtgtgtctctgagtatccagacgactgggcaccgcagaatgatgagactaatctatatgctttatctactttttcagaggtgctcgcatcctatctcagaagctctcccccgtttctctcccttttgctaaggaacacacattcttcattacagtaaaagtaacagagtaatttgagcttgtgctgaacttagttttaaaagtaaaattaaaaaggtattattttaatccaatatataatggcaaaatattctttattaaaaattacaatggcaaagatatcagcaataataattttaatttaataaattttattaaattaataaaatttaataattttaatttaataaaaaatatcagcaataaagttctactgtaacttttcccctagaagattaaggaagcataaaatattgtgcttcaaattagaagtagctgagaaagaaaagaggggggaaagactggagacattgactggacaaggaatgtgacagttgctaaaaggcatctaaaacgcaccatgagtgggccacaggtggacactgaggggtttggttggttggttggttggttttcgtagcaaagaaagtaggcttagtcaatattgaagtttacagtgactatgggatcagttactctgtagaactgactactctcttggcccaaggatcagaaggaagtttcccatagggcttttatgaagaaccctcgcagccttctcatccttgcagtgtacgtatgatgaattgcacagtgttatttctttacaccagactgacctgagagcgggaccatgcctgttttgctcatatgtgtatccctcgatggaggatctccaaagcaaagtttactaaaaccttgatcagggagggagtgggggtggtgaaaaggatggatatatggggtagcccaggctacttttttcctaatctagcttaatcctttggtagaattttgcatgtgtagaaaaatgaaatgactgcctgtccaccaggcagcctccctataccttatgaatcttagccaagctcttggtagatgggttgctatgagcttaacattacactcctcagcaaattcttagtgattttccggagctaaaaacaaacaaacaaaatgtactcaaataattattggaaaacattacagatcctgaatcacttaagaaaggtgcagttaagtttaccatatttcacttaataatatgggaagatgaatgcatttaaaagaggtttaggataggattgtaactgagatcacttattgttcaagccctggttgataacatagaattatacagcatccatttccaagcagcaggcttttcatggctccttgtcttaatttgtaaaccctgaggaacaggtctggcccagtggtctttggatctgtccttgcatcttggctctgccattgtgttagccacatgtcctttgacaggttccttacactctgtaaacttggttcttcatctgtaaaatatgggttattcctcccacacaaggtcatcccaaggattgaatgaagtaatgcatataaagctcttagcattatgtgcctggcacatagttttactaaaaagtttgttattattacacaggaatagttacgaatatataactttattctcgctaggtttcttggtacacagtactccattttagctatgttgtcactctggagttgtgtttttgaaaagtatttgttgtgactctttagttctctctttatagtatttttccttacttatcatcagacagaaaataaatcacagaggaaagaaattacttcactcttgcattggagccagttagctacaggaaatcaggagaactggtgagggaaacaaagaaagttgaacttttggacagagaagtaattgtgttttttttttttttttgcaacagactgagtattaaattcttgcctgtgattgcaaacttctggatggtgtcatccgagggtgtatttgcaaaaataaaatataattataaaatataaagagagaaaaaaggtctctagcatattgaaatgaaccagtttcattgctgtacgtatgaaaatgaggagtgtgcctgccttgctcagcattgcctgctgggcttcaaatgcagttctctgcagctgtttctcgggtttttcacttctcaaaattgcaagttaaaactgaaaatcaaaagccgggagaatgtagctgggcctcaaacatgtggagccacagccctgtgagtaaaaagatcaggttttcttctcatgaccttacagtgaggaaggctgggcggcttagcccagaatgcacctggaatccattaaagtggactcgtggagacaaatgctgggctgtcagaaaacccagcctctaattcccctggctttttctcattcatgtttttccctttctcttacccttccccctcactctttctgcctctctttttctctgttcttttcattctgtgacctaagggaagctattcccttttatgctgctgcagagacttaaaaatactatagaagggtaaaataacttatgaggctttttacaacgatcaaattatttaaaatttacagaaacacacagccattgggaattcacttcttgaatgccgtttattaagcaggttgttgccatcagtgttacaaatggattcttgggcaggaatcaaggtcaggtgccctgtggtgggaggaagcagatgaagaggacccgagggagaggcataggcaggtgtacagattagttgagcagcccagttacagtgccattggacagttgtgtggtgcacagtcacaccctaaataggatgttctgctcacctaaattgttaggactcaactaatttaaactcttccccatctatttcaaatgcaggtgaagataaagttactctaataatgcttctttctaacaataactttaaaaatgttatgacagttataaatcatacatgattgaaaggaaatccgaagttaattttctttgtaagatatgtttattgactctaagattcagtattggtatgaccctcaagtcatctctgcgatgggtgactcacttgctcgcctacctcccgccctttcagtgtcatttgatacctttttaaatgcaacatgggcgggctttcagagttgtcagagggaactgtgctcaaggccagaggagttctcgtccctctttaattggggtataaatcagtgcccctcaccccatatgaacaaaggcaacatgaatatattaagtttcatgtagtctttacaatctgggtcttaaatttttctaacataaaaatctggcaagcatgatgtttgaattttgtggatgtcttgcctcattatcataagggaaaatgttagttggcaagtgccgcatgtatgtctgtattctctttcattgatacttcataatcactttttaaaagttggctttattttttggatgaaatattcacgcctaacaccacttaagatgtagggtcttgctgacattaagttcatgctaatgataacttgagagtaataatgacatgagtatgttcatggagtcctttataaagctgggtagttccttttaccttaggtatcttaagaatggcttttttacttctttgtctccttctgccatgtccattaagggaacacatttcagtcatgcttaccacagtctctctcatccatctttccttttcctttccagtgtcaacatgcgagttctggacagcacaggaggagataccatagtcgggggccagatcattgcttatcccacataagcctgtggtttagaaagctttctgtttaggatggcttggaaggaatgactcaggaaaaaagaaacggttagaagcttataatattagtgtaggagggaaatgaagaccacagttaaaacagtgagggtggggagaagaaagtataaatttaagagacatataagactgaaaatctacacagagattgatcagatataggacactctttcttaaagtgtgagtctttcaccatattgggtatccttaaaaagacagattcctgggtttcgcccagactcactgaatcatatcttcttggagtaggccacagaacctgcatttttaacaagtcctctatatgattcttagatgtactaaaacttaaattgtaagggagagggaggcataaatgatggccctgggtgactggttgcatattgatactcaaatgagatggagaatatggggaggagagagtggtttgtgggagagaaaagatggttcacttttttacatgtctttttgtgtcactctatttcttctatctactttatttgtctcactttgttgatactgccaactgtatggacagatgactttcaaagttctctgtccctattacactgcaagggctcatagataaccttagcaggtatcttggtgtatagttattactataacttttaggacctcttggccatatctgctcattcttacaaattcactgtcttccacttcttcttgttctgtggcttcactgctgctactatgctcattatttacccatagtcatttttctcttccctccccttgctctgttcttcactcttgccactctacgaatgcattttgctattggtgattctgtcatttttgaatgtaagtgagctcttcaggaaaaagtacctttgataaataaaaaagatcaatctattttcacccatccagagcttagagattttttacatttttttctagaattttgtgatttttattgttttaaagcttttcactgataggtatttatgtgtggtcttcccagtggtccagttggaccatgtggcactggtattttcaactctgccttcagtttgggcagtaatgagtttgcagatcagccctgagctggcctttctgcctacagactgatttataccttgtcttccacctttctctccaaccctatccagactgtatgatccaccttaacttcttccaccattacatgttctctagcccctcatccaacccaattcctatagttactttttatttaattcattggtttgcagtcataactgggttgcctggttttctgaccaggagtgtacatcttctagattcggctccaaagaaacttctttctagaaaatttccagattccatcttctatacccaccctccagtgtgattcatatgttccaaggaacccatgcaaaactgttataggttgttttgcctgcactgcaattcttggtttatttgtctcctctactggcacataagcttattgagggtagccccagcatttttcggggttccaagagccacatatggtatacctgccacaaagacactaattaattatattgaatgaatggatggatgaatgaatgaataatctgtcttatttttattgagagtctaagcttactgagagcagaagtcctggatctgtatacaactttgaaactgatttggtgccctgcgtactgtggctgctcctacttatctggtctcactttcactctgaagacgtgcctgtcatcagccgtttgtctgtcagcctgtaatcacagagacactgtacctttgacgtacttggaggccagtaggaagaatgtcaggatttgacatcttggtgcatagctcagcagagaatctcagattacctggtctttgaagtattcctcctgcacctggccttctctcctccctgatcccttgaattttggtgttcatcttcttacatgcatgtaatgtccatgtgtgctccttatcaggtaactacaacagagttttgtttttattcactttaaagccacctgcttcagtctttgaaatgaatggcggtgctgttaagcaaggggaggcgatagtttgttggaattaagagcaaggactgtggagccagtctgccagtgttccaattacatttatgagctgtgtgaccttgagaatgttacttgacttctctgtggctcagtttcctcatttgtaatttggggatatatatgatatatacttcatactatgaaggattagttaatgaaacagtacatagcataatgtgttaactattattgttatctttattacttcacttatattttgtgttcttataaattgatgccaaaggcaattttcatttatcgataaatgtatgcacatattcactttatataagtttactgtatttgtttttttgtttttttgttttttggagacagagtctcgctctgtcgcccaggctggagtgcagtggtgtgatcttggctcactgcaagctccgcctcctgggttcatgccattctcctgcctcagcctcccgagtaggctcggactacaggtgcccaccaccacgcctggctaattttttgtatttttttagtagagacggggtttcaccatgttagccaggatggtctcgatctcctgacctcatgatccgcccaccttggcctcccaaagtgctgggattacaggcgtgagccaacacgcccggccaatataagtttattgtatacttgctctgttctgggtattttattaggcattggagatacaaaaatttcaagacgtgttatgtatctcttttgcctggagttgttggtctatggaagatataaatactaatactattagcatattaatactagtagtgggataagtgctgtgactgggaaactacagtgtgtaatgggaagatctaggaatactttgcccaacattggagtgtcagggaaggctttcctgctgagtcctgaaggacagataggaaccagccacgtgaaggggaaaaaggagccgtgcttgactgttcaagcacaagtagctgctgtacaaaggcctggagataaaagaaagcagagtgcttttgaggaactgaaaatttagtgtagggaggaaactagcaagtgttgaggctttgggtagagagccagatgctgccaggccttgtctactatataaaggagcttggacttttttttacaagtactgtgaagccactgaaaggtgtaacagggcagtgacatgatcagatttatgtatgtacgttaaccttttcattgaaaaataaaagtagaatattatatgaataaatgtgtagctgataaagtattttgacgcaaacaccctggtaagtacaacacaggtcaagaaataggactttgccagtcactccctgaagccccttcatgggccacatcccagtcccagttccctcccttcccacaaagactaccctgatgccccagtgcctacaggcgtcatgtccttgtgttcccttatagttcatccaaatgtgcatctctaggcattatcatttaatcttgctcattttttaaatgtcttttaaggcttcaaaaaaaatctacaggccgagcgtggtggctcacgcctgtaatctcagcactttggtaggcagaggcaggcggatcacaaggtcaggagatcgagaccatcatggctaacacggtgaaaccctgtctctactaaaaatacaaaaaaattagctgggtgtggtgacacacgcctgtagtcccagctactggggaggctgaggcaggagaatggcgtgaacccaggaggcagagcttacagtgagccaagatcgctccactgcactccagcctgggcgacagagcgagactctgtctcaaaaaaaaaaaaaaaaaaaaaaaaaaaaaaaaagaagaagaagaatcttgttgtgggagtagattgccaatgtcaaaccaggaagtcaagtaggcctttggtgtttatctaaatgaaaacctagaataggaaataattgacaagttccagtaataaataattagcattcataagacttgacagttgtatttgagggccaaaggagacaaagaattttctttatgggatggtgggatctctcagtgggcttctaatacttggagctattgaggaatgctataaataataaaggtttggatttggatatacagaattgaagtgcctgtgggcccaagaggagatatccaatttatatctctcaagctttatttttagctgcttcctgtttgccagtggtacactgtaacttaagaatgggtgtgtgtatgtgtgtgtgtgttgtgcgtgtgtgtgtctcagtcataaaaaaatatatccaatatgaaatatgctttcaggtacaatatatatcctttctgttgatgatagaaaaatgcagaaagtccaaaggagatcgtatttagttcaaattatcctgctacaataaataaatgaagaatagctggaagaatgagaaatcgaggtgctgatacagcactgcagccacgtgggtgtcctcaaatcactttctggagctgaagccaaagaaacattgtgcaggctgcactctgggaggagggcatcagcttgagtgagtcgtgctgctgcttctcaagttgaaaaagaaaaaaggttcctgatgaagtgtagatagctattagggcttgtaacaacttagtgagcaatttttagttcatatctgtgattcatttacagtgagttcagtattacaagaaaaaaattgggaaatgaagagataagaataaataaaatctgtatgtattgctaatattttatattaacttcagcatcttcccattctaaatcataatttctagaaaccacatgaagtttactattttacctttttccaagagcctgttgatatgagaaatattttaaagtattactgaaaccagtttgaatcttttgccttctgcttttctactataacctgtaacttggtcagagaagttgggacaatatgattacattcagcatttggggtcaacttttattttcagtatagcagtaactctagatctaaaactggggaatgtgtttaatgcctggggcatattgaagttagctcacaagtttggctcataattttaatttatttattctgtttttttggcaacataggagataactataccccacaacattttttatgattcacaaagaaaagttctaaattaacttttatccactgtactgccaaattactttttaaagacatattctttgaaactgtattcccaggacaaaaaataaatattatgggttcagggtgttgtcacaggcattatttcattatttctcttgaatgtaagtggcttcaaagacaaacaaaattgttttggaggtcaagggatgtttttcttgtttttttttttccacaccatgacaaattatgctttccttcctgaattgactgagcccatttagtgtcttcatgcctgcccccttcatacaacaccatctgccctctactttgaacattctgaacttctctgatctcctgggttcctcctgatgatctcacagtgagaattttgtcttagtcctggctccagaccctctgctgggaagtgcctgggcagcctggatttcaacacagctcctcccactgaagcagccctccatgccagcagcatgcctctgatgggtggcttattttggatcacatttaccctctaagacagtggctttgaaactttttcactgtgacctacagtaacaaacaacccagtacagacataactttttttatttgtttctagtttttaattttatttttgtttctaattttattacactgtttatttttatttcaacttttagatttagggggtacatgtgcagttccatagtatgtatattgtgtgatgctgcaatttgggattcaatttatcctgacacccaggtagtaagcataatactcaataggaagtttctcaacccttgtttccctccctccctcccccatctagtagtccccactgtcttttgttcctgtatgtccatgtgtacccaatgtttagctcccacttactagtgagaacatgcggtattgtggtatttggttttctgtgtctgcattactttgcttaggataatggcctctagctccatgttgctgcgacggatgtgatttcattcttttctatgcctgcctagtattccataatgtatatgtaccacattttctttatccaccattgatgggcacctaggttgattctgtgtttttgctgttgtaaatagtagtgcagtggacgcacaagctgatgcacacataacttcaactttacatatataaatatataaataaatgtttcatgagatagcccttgcatttaaattatgccttgtcctcattttctatttcattccgttaaaaatatgctgattgcaacccattatattcatttcacagtatatttatagtttgaaagccctgcctagcattctgataaatacaaaattttttccagagaatccctacccaatatcctttcttggacatctccactgtggagaccattccactctttaagatgccctctttattctataattctagtgtttagaatgcttattctcaaaatgtattgggaagcatctttatttcattaagaaacagtacaggcctgtgattaatgattatatgtcaggtttccggggctgaatggaataaactgtgcagagcattatttcctactgcacccagagtaaaatcagccacagttcattcactgttttaaaaaggcctctggattttatgaagctctgcataatttcagcaaaacctttaaaaatcaaattatcaaagaaaattattcataaaacattaaaagcagaaatagtgggtaaatatattaaccgtactctaagagacagcaaaatatcatttcacgtatgctagctcctccaggcctacctcactttggatttgatgttttcccaccatgagggcagcaaaaattggtgatttgactacggtttttcccattgtgaaaaagtgtccctcattattttgaaacttcattcctcaagtaattctttgcccttttgcctgccgtgttctcagaatattaggcaagtgctctttcaagtaaatgggagtaactgagtgttcaggcagcgacaggaagatgatggggagtgtacgaggtggcagcaatggccggtcaggttttttagtgtcggtgtatttgttgctagggctgctgtaacaaaataccatagactaggtggcttaaaccaacagaaatttattctctctcagttctggaagctagaagtctgaaatcaagatatcaataggcttcattccttctggaggctctctgaaggagagaccatcctaagctgctctcctagcttctggtggttgtaggcaatctttggtgttcttggcttgcaaatgcatcatctctctctcactctgacacagataagttatttcattacaatatagatctgttttattttataaatatgccataattttaatgagtggaatatcaagtgtttgctcatttttttttttaggtggagtttcgctcttgttgcccaggatggagtgcaatggcccgatctcagctcaccgcaacctccacctcctgggttcaagcgattctcctgcctcagcctccctagtagctgggattacaggcatgtgccaccacgcccagctaatgttgtatttttagtagagatggggtttctgcatgttggtcaggctggtctcgaactcccgacctcaggtgatccgcctgcctcggcctcccaaagtgctgggattacaggtgtgagccaccacgcccagcctgtttgcatattttaacaaggcaaaagttattgacaactgaactatattgtatactgtaatgacttttcaatgtgtgtacaactctttgttttctcttggattcataatagctttttgttttatttggtaagttttttatatggttatctctagtgaccagccagactctcactcttgtgtaagttttctatctattcaaacaagacattcttaataagacattttttaaaaataattcatctttttgaagaagtaatgctgcatctttttgacatgctaggatgtggattgcttgcagccaggtctgctgtacagccatctttgttcctttttctcttgaattggattccttgtgccatgtcttctttttgatatacatcctaatttaggtggagatattttccactggcttccagagaaagcatttatgagaggtaaattttgagaccttggatgtctgtatatgttttttcttccctcaagtttaaagggtagcttggctggatatgaaattatagtctggaaattgtctctctgagttttggagtcattgttttattgtatactagtgtctagtgttgctgttgagatgtctgaccccactattcctgatgctttgaatgaaacctgatattccactctgaagcatataggatcttttttatgttactagtgttttgaaattacgggatgatgtatcttgttttgagatgagtctgtgtactgtgcacttcatggattctttcaatatggaaacttatcccctttagttctagcaattttccttgatatatttggatctccttttcttcccccttttttcttttttctttcttttttttttcctctcttctttttcacatgtttaacctcttgggccagtcctcttttttttttttcctctgctgttttctattttattttcttactttttttgcattttcaaggtttcttcaacttttctccccagcccttttattgcacttaccttcctgctattttgttttccatttcaagagcttcttttgtcttgaaatttctttctgcctgcatggtttaatttctcccaagctgcattaatgagtttgttcatttgggtctcttttgtcctattatgggatttccacaaatctctggtagtccttgactgcctaaaaatgcatacaaatgctgtaacaaattaccacatactcagtggcctaaaacagcacagagtgatcttacagttttgtagaagtgtaacacagggctaaaatcaaggtgttagcagggctacattttattctggaagctctagggcagaatacttttctttgcctttttctagcttttggagttcacatatattcctttgcttgtagctccctgcctccaccttcaaagctagcaaccttgcatctctttgattcttcctccatggtcacatctctctccgactacagccaagaaaggttctttgcttttaaggacccgtgtgactagattgggaccacctgggtaatctagaataatctcccatcacaaggttttaaatcatatctacaaagtccctttgccccagtggaaggtaatgtatgcacagtttcttgggggactgttattttgcctgtcacaggttctaaacagctaattgccactgtgtgtgtgtgtgtgtgtgtgtgtgtgtgtgtgtgtgtgtgtgtgtagctttttgactgcactataaggttgatagtttgattaaatctttttcattgggaaatacttggtgttcagaatctttagatttttattcttcattatagacttcttgtcctccggagtcatgttatatttaaaatagatggtatatttttgatgttgtgtgttataaaatttatattaaatttttataagataaataaatgtgtcaactacatacagttattataactgctcagttcttgcccaagccaacatttatatattatattttcttctctgacaggactggccactgtccatcatcctggctattcttgcatgtttatttttttttttcttaaaatcatactgactactgacaattgctaactggcagttgtctgtatggcttctcacatgatcactggatgcttgcatagacattgactgagtgataacatcaaaaagttgtccagctgaactttttgaaacatattttacacatacagttgtaaaacatgttaggcatttaaaatatcaagctcctttttaaaatgggtaaatatcattaaattataattttcatgaacaatataggcagacctggttattccctcctattgcctttccaggttttaaaatttctccattataatagattctttaagaatttgtcattagaatttgatatgtaagtgtatttttaaccgtagtctttaagctatgccattctaccaaaatagaggtcttgttcctaaatttgaataatttttacttatcatgtttcttcctctcaccttttgtaggttgaatattagggcaaagtatacttactcagttaaaagggattacaattataaatgttgtttgattccatttaaatagattatgtttgggtggcatgcttggatatttgggtaataacacttcatgtcatggaagtaaacattgagataatgacatggaaatgccttttcccatttaacagtactactctacattttattttaattaacttggtatattccgacacttcgattctttttatttacaaatcatctagaatacttttcatttgagtaaaatgtgtttcttttaatgtctgctttggcataattgactcctcagtattctgcttgagtggggccaagttgacttaaattttatatattttagaatttaatatttgggatattgaattcacagcattaaaatgaaattaagtggtaatgtactgctatattaaatccagtgatttaattaatatagaaatatagattgtaagaggaaatagttttttacatttcagagctaataagttattttccctgaaaaagtcttaatatacaatgagttcccattctgtcataccgttcatccttctagcaattgtttccagaaagggcaagtagttttgttcccaaagtagatattgaaaaaggaaagctcattgtccatttctgtgtactctagccctggccagtgtcaaaggtaaacaataccggacactaaagtggcaaggataagttttaatcagtagtaagtatttcagtaggaaaagagttcagcataaactgaactgaacgtcaatttgtacagaggtgaataggcattttaaagggaggagggcaagcaggggcttagtagagccaggaaagagaaaaattacaaagggtagtcaatgtacatgtgattaggccagctaatcacacatctgctaagtggcaattatcgagggtagaattctatcctcccacagagactgaaagacagagaccctatcctcaaatgttgacaggaacaaacaaaatttttctggaagccttgagtttcttaggcagacactttcaacagggagagggtcatctcagggatatgaccttgaggtattggaaacttgttagtgtttactcttcatggaatgaggttgaggcctagccaagaaggcacagaggagcctggctagggtttgatcacgaagagagtgtttgttactaccttaaggggcccaaggttctgaagatgcaaaccagaaccaccatcccctggaccaactctaccttagagtagtacattaggtgtgcaggctcatcagggagggaaagagttgttcaggaaatctacatgattggtgtctcatgttccttgggtgggccctgagcaaccacatgagcacagaatggcagtatctcttcttctaatgtgtgccccttttctcagatctcatgccttgctctgtcttgctgtcatgaaaatggcaaggcttagaacccttggacccttctgcctagcttttggtagagccactgactctggcatgttctggctcagttcttattgcaaacttggtgacattctttgaaagcgccgttcttcccctcactaagaaggcaaaaccattctagattcagataattcagataattctggattccattctcagcttcactgtttaactgtgtggctctgaacaagtaatctcctatccaaattgctttttcacaacctataaaatggggacggaatacctaatgttgagttgagaagatgaaatgacacaatgtacttagaggcttgggcacataacatgtgcttaattaatatgaagtacactcccctctcctttccctccctgtgcattttgcttcacaatgccagtgctaacctttagccacctgatcaaacacttggaatatggacgccaagccaggccagagattagctgaacattccccttggactgctgactacccactcagagcctcctagatcaagtctctatctttcaggcttaatctggtcctcttggcagatgtctgccaagacccaatgtgctttacagatgaggcctcagaggtgagaaatccacttccctttagctacatttataggaattccataccaaatttaacatattactaacatttaacattcatggttagttttcacatttaaaatggagggaaaaaagatgaatcactactgcattagtcatgtttttaaaaggagtggtaatacatgactgtcttaacttattggagtttgtttccaaacacacaaaggtgtttggttgaaagttaaatggttttctatcaagttactgtgttcaggagacttttagaatgaatagaataatttacatttttaaaatagagttgacctaattctggcctattttaatggtgtgcccaagtgcacgtggacagaggtgtggcatatgtacagtagacacagctgcagcaaagctggcaaatgggaagctggtggtgcactaccctggtacttttagagtttgcaatttctaaggagttcactgttgtgttctgaatgtaaatttataatttttgtaaagcttgtttcattttaacttaaatttgtagttccataactatctactgtataaaatcagattttaaacgcaaatcttctactttatgaatttacgaagtaaatattttataggttggtaaaactatagttattctgaaaatgagaaaaagaagatggatcattttattggagttatcctcctttgttggaaaggtctgacaaatcataaagtctcatttaaatacactttaaaaaatatgtagatttgcctatactgtggatcaaattgtgatctttggagcatagctacatatggaaaagcctgctataaagttgttaggttctgaaaagtactaggaaataggattaattataaagggaattatgagttctattgtttctagtatttgtttcttgtatactgttgattaatttaaataagtatgagtgatctcttggcacatctttgttttcaaagacctaatttctttttattgtaagtgtttattttagcagtatttgtgtaaattaaatagacagttgctatgaactgaatgggaccctcctcaaaatttatattgaagccctaaccccttatgtggaagtatttagagaaaagggcctataggagagaattagatttagatggaggtcctaaaggtggggctctcatgataggataagtgccctgataagaagcggtgccagagagcttgtactcttgtgcactctctctcacgcttgccttatccccacaccatacatctaggacaggccaggtgagcacacagtaagatggcggcggccttctaaaagccaggaacagagctctcaccaaaacctgaccatgcgggcaccctgatgtcagaccttcagcttccagaacttgtaaaaaataaatttctgttgtttaagctacccagtctatggcattttgttatggcagcctgggctaagacaacagtatacaaatttaaataatattctgtgaaccttgcaatgttaaattttaatcttttcacaggcagttattttctatagactgtctatatcaaaactatatgaaaattttaaaaatagaagcatttaatcacttgcagttcaaatctataccaataaaaatagatagcaacattgtttttagggttccttttaatggttatttaatcaaataaactgtcacctttttagtgatacagacttcttcgattgccaactattatactccatacataatattttaaaaagcatttatgataatagaagcagtctatccctttaaaattggtacaaaaatttggattaatgagactgctcaactttggaaaaatagttatggctcattcttcctttcagaatcacaacttaattcatagacacagcacatcatgaccaaactctatgcctttccccaccaacattccacccttacactcagaaaatcaatagctctttcctgtgttcagattaatttatttcatataaattcacctttgaaaatattcaaagtatcagtttttaaactttttggacttggaagcactttgtactcttaaaaattaatgaggacatcaaacagctttgtttatttgggctgtatctatcaaagtttaccatattagaaattaaaactgagaagtttgaaacatttatttgttcatttactcatatttatatattgtcaaagctcatttcatattaacataaacatattttaggaaaaaataactatatatacatatatatatatatatatatattttttttttttttttttttttttttttaggtacagggtctcactgtgtcacccagcctggagtgcagtggtgcagtcatagctcactgcagctttgaacttctgggctccagcaatcttgctgcctcagcctcctaagctgggacttcaggtgcatgccaccaggcccagctaatttttaaaaaattattttgtgtacagacagttttgctatgtggaactcctgggctcaggcaatcctcctaccttggcctcctaaagcactaggattacaggcataagccactgtacccagccaaactatatttttttaaaacaaaaaatagaaggaaggtgttgttttacatctttgcaaatcttatgtgtctgcttctgcacttgatttgttgctatgtgtttttttggttgaagtatgtgaagaaaatccagcctcacaggaatatgtgattgacaagggaggagtattttaataatcttttcaaataattgtgaatattcttctttgacgctacactaaaacttgactgatagtggttccataaaaattaatttcagtatagaatctgaagccatgttaatgaactcttcatactcttttacattaaaatccattggcatattttacacttaggagtggctgtcttatcggtgcatggttttataacatcatgcctttgttattttgcatgtgtgttcactgagttatttcagtctaccgaatgttgacacatttaattatacaatataaaaatcatgtttgttgatgttcttactgatttcatcagaaaaatctttaagtattggtaagctcttaagctcttggtagtggatgcaaattttccaaaattcttatttccagttgaaagctccaagtttgtcattggcaacaaaggctttcagctttccttgaactggcaggccttccttgtttattttcaagaatatttctgtgctaacacccaaattgagataactataatttgtcagttgatcattctgtcatgtaaaaatgtttcatgaaaaaaccgagctagctcagctctcaactcagtgcatgacttcttttgtttgtaacgttcttgtactttggtactccgtttaatcacataggatattagaaagatgtatactcaaagagttgagattttataaagattaatcacttttaccacttcatcaaggacatttttaaataaaattggctttaaaaattaaacaacaacaacaacaaaaacctgagtgcatggcagtgcaaaatcatacaaggactactagggcagtttagtgcccctgcttggattcttgctaaggttacagcagttttacttaatactgcttttgtaccatcagtgcaaatatcaacatataacatctttacgttattatgaaaatgattcttatttgtgaattctctaaaatgtaatagtctcggaagcccctccctgggccttactttgagaacagctgctctaaggggtgaaactgtagtttacaaaagaggaatagtgtaaatatttcctcagttaacctcctcttaactaacttgccagtgaacccagcttccattccttgtgtaacacagtagctgaatgtcaggacttgtaggttgccctttactttacatttatttcttttccccccagtagagttaccggctgagcaagtgtcagctgtatttgttctcaaaccaggtaatacagtttccctaatacctgtaatgagacagttttaataataccaatagataaagtgtgagttcaaaaagaaaaagctaatatttctagaaccaacctaaaagctttggaataacttactgtaaaaaattgctgtcatgatatagtgtgattgagatttgtagaagattagggaaaaactcataaaaatctagaaggcttctgcgttccctcacaggtatctttaatttcttcctatataataaagaaaacaaagctggaaattgtggtgatgtgttatgtgtgttctttgcaggaaagaacaatgaaactccatctgtagacccatattcagagaataggttttggctcaccttcaaaagattggtgaatctgtgtacacatggatatattttaagttgaagcacaattcataaattaatgtctgtctgtttttttaaaaaataatttcccacttcaccaccattcacagtgaactgatttattactggtcaggatcacattgaataagatagtttctcagctgccatccatgaactaagagcaaatttccattggtttttatgactgtaaaatatagtctcttccattatttcactttgtatctaaggctgggtaagatcgtgttggtgaaagatttagataactttttagaaatacagctattacaggtcagcttttctaatgatatagggacagacctgaaggtgccataaacttttttcttttggggcgccagtgttacattgaattggaaactgtttgaaataaacaaactgcaggttggggcttggacattttcacagaaatttgcataacatttcatgaaggatgagaattatatcaaatgttctggttatctataaaaataagcttattggttaatcacacatgtgagggtttactggctggtagcaattcattgacatcagctttatcatgggtcggtgtatatagtgccatttatagatgcatcatgacatggtacaatgacacaagttgggaaacaaatgacctggcttccctgcctggcccaccagtcaccatgagtcagtgaagatgatattcccaactccctggcaatgagtgtgcagtatgaattgtttttctcctagaagtagagaattcattcacactctcatagtctgtttacaaacagtacacacactggcaagctgactggctagagcaagggagctttgtctgttactaaattgctaagaaactcatcaatctttttagcactagtctttttagcaccaaacaccgaatggtaaccaaatgctgaaattattactaaatataaagggatctctccaaattcctgattccataatgatcacataatcactgccagcagtgtggctgacagtgagttacaggtttgttccttcactttttccttctttctgaaaatatttattgagcatctgctgtgtgccacactgttctatgattggggatccaattgcgaatacaatagtgaagaaaaaagtcctgcccttgtagaacttaaattctaggaggggaaacatatacatagacatattcatacatatatttactaaagggaaaaaagaaaaggggaattaaatattattttgggaggatgatgaaattctgatagggtgaccagggaaggcctcacctaggccatttctttagcataaacttctaaaggaaaaacataatctggaagaggtagtctctcagaacattttaaagtatttgtaaactgaggtctatgaggtttgtttgagagaactaatacatcttaacttttactaactttaactgaaatccaacatttcttccaatcatgagtagagataaccaatcttgatggtattgggaggatctgtaacaaagttacaggtaggtatcacagatattttcattaccacattacagttgttatagacatctcaaaaattatgcttattaccacttacaaattatagtagttattatccctgctattaaatgttggtatttcatgccttaatttaaaaaagcctgtattattattttttaaatatgtgtattgataattatatttcaaaataatagatttccatgtatccttacatattatgtcttacgaattttaaaacattttgagaaagaggtcaaggcttcactagattgccaaaagaggttcatggcatagaaatgttaagctttagcttcatccctaattgctttcttctacctcccacaggtacagcacacttttgatttgtttccctcacttggagattactcaaatacatcctgaacagatgggaagggttttctggttaattccttagaattctgattgtgaaagatcctttgtttgcttcctgcttaatgcaagccacacactaatttgcagaataatatagctagtcaaacagaaatttggcttcctggaaaatgacaatgtaattcttttttttattttattttatttatttttattttattttatttttttttttgagacggagtctcgctgtgtctcccaggttggagtgcagtggcgcgatctcggctcactgcaagctccgcctcccaggttcatgccattctcctgcctcagcctcccaagtagctgggactacaggcgcccgccaacacgcccggctaattttttgtatttttagtagaaacggggtttcaccgtgttagccaagatggtctcgatctcctgacctcgtgatccgcccgtctcggcctcccaaagtggacaatgtaattcttaacagaagatcaacttttagacttcttagaaagatatttgaaggacctttaaggcagtgcagttcagtttatgggaaagagggatgtaaaaattctgagttagaatcagctcccactcacgtttgccacgcttcccaccatggtgatgaccaagtgggtctgtgcagattgagagatcatggattatggaccacagtaccttcgcattgaccagctatgggaaataagaggcaatacatatgttcaactgtcttagcaaggtggccgtaagaatagaactgagagcatcttattcaagtgaaaaggaggagtagggtgagcactggttaaatgggtattccagagaattttgccctgccaacacatgttctatgcttcagatctctttgaatatattctactacttcttgtcatgagtaaaaaaagtaaaaattctcaacatctcgatgttgccagaatcctgagagagaaaactgtttactatataatttttacattttagacaaactttacgcttgtttctaatgtggagggaagtcagttgtgtgtcattaagcccttggattatatcttcaagtgtgccctttagttctgagaaatagacactttagaagtgtggtgaaagctgtgagtctgatgaactcatttccatgatttattttcctttacaggttggtgaaagatgctccttgggatgaggtcccgcttgctcactccctggttggttttgccactgcttatgacttcttgtacaactacctgagcaagacacaacaggagaagtttcttgaagtgattgccaatgcctcagggtatatgtatgaaacttcatacaggagaggatggggatttcaatacctgcacaatcatcagcccaccaactgtatggctttgctcacgggaagcctagtcctgatgaatcaaggtgggtgtggacacagccaaggtgatgcctgagctgacggaagtcatagttgccatgttgtgagcaaagcatttttataaccattcttagtacatgttcatacttggatcctaactaaacccatgaaatgaagtagtccctacagtatcacttagttaattgagggacatctcctccttattttctgctagtatattagccggcatgttatctaattatggcttatgatgatcccagaacaaatcctcacagctcagggtcagtgataaatattcattttttccagagaattttgacagtgaagacagccatcctggaataagtgaaattttaaaaagctaaacacatggttggttatttgaaatgaagatttccagcacacagatgtgaatcataacaccactactattttttcctcttaatatttaaaacaaccaaactggattatttacatccaaattggaagcaatttttgtggattgtgtagctactttgctttaacatattgcataattgccaataatacattttctttgttcttttaactctaaattacaacttctgtagaaatctataaatgactgattaagattgtgtttaagaaaagcagctctgagatcacagggaattatcagaatattaaatatataattggagattggaaatctaacagaatttaactcgattatactccccataagaattattaagcattttgttgattatccagcatcggattttacccaaacctagctttctcccttgtcacatcaaccaaccgtcacttttaattaggtcttagaggaaaagaaactaacattaactgagtatatgacatgtgcaagtctttttccatattttattcaattctcacatcaaccatataaggcagctgggatttggacccacttctggccatccataaagttcaatctctttctgctgtattttgttatctctgtcagaaggggaattccatttataataacttaagcaaaatttaattatgagagtgaattttcatgctagctccccttgtcccctactctcacaaaaacctaaagaaaattaaaacatcaggtcaggcgtggtggctcacacctgtaatcccagcactttggaaggccaaagcgggcggatcacttgaggacaggagttcgaggccagcctggccaacatggggaaatcccgtctctactaaaaatacaaaaattagctgggcgttgtggcgtgtgcctgtaatcccagctactcaggaggctgaggcaggagaatcacttgaacctgggaggcggaggttgcagtgagccaagatcccaccactgcactccagccttggcaacagagtgagactcagccttaaagaaataaataaataaaatagaaaggaaaagaaaattaaaacatcaaaatgcaaacaatgtgagaatccactaacaaaccatttataaagccccaggcctgtgaaaagacaccatcatgaaatggtgaaaggatcccttaggtgagccaaatttctgcttcaggtcttaaatttaagctactatagttttatttccttaaataaatttttatttatttaagggaaggagtagagtttatttcttcagtctttgtaaataacattattccaaataataagcagtgacccaaaatactggtttggattgaatcaaaatatgtcattttgccctggcaggaattttcctatgcatttattttctgattaaagttatggtggccctggcagacactcttccagagcccccacataagtacacacatttatgacaagactagacagaaggaggtagaaatcagttggaaagaagacaggtgtgaaatgtttaaatgattacaccatagttacagtaaccccagagagtgaaataaaagataccatgaaaagcgttatggttaaatataaaatgagtatattaacttggaattcaagaaagcagtgttctttcagtaattttcttcatgtaactttgaagatggataggagaacttaaggggaaattaaaaaacattccaggcaaggtattcgggtggcagaaaaaaaatacagggtatagcttcaattaacagtatcagtaccttgtattcacagagagttgcagtttacaaagtattttggtagacattgcctcatgtcttctgaagagggttgttgtaaggaacaaataaggaaatttaggtaatgtggtatcctgggaacagtgatctgattttaggcatcagtcacattggtatctggtgggagatggaagacacacaggaaaaggatgaagataattagaattttaaaccagaatggtagagaatggaaattgaaaactatccagaatattgacatatcaggtatgatgctgggtggcagaagaggccagggtatgatgatcagtcacctctgcatacccaagcctgacagctgcattgcccccattagtcaggagccaagtcttagcctgggacctatatttaggcccagagctggttagatctgggcctctggaagccccacacctgccacatagtaggccatggtagcgtggtcaacatgtttgtggaagtaaagcaatgtggctacacccacaccaggaggcattgggcttaattttattctcaagggttgcgtgttttaaaggaaaaccttaaatctaaagacctaggttgagattaaagttgtgttcatttttagtcatgtgccagaggtcttgaacaagtcagcgtttctgttttggggcaatgatacataattgggttgttaaaaggattaactaagattctgttcagtgctgtgtaagttataaatgttatagaaatatgaggagttggccgggcgcggtggctcacgcttgtaatcccagcactttgggaggccgaggcgggcggatcacgaggtcaggagatcgagaccatcctggctaacacggtgaaaccccgtctctactaaaaatacaaaaaaaaaattagccgggcgtgatggcgggcgcctgcagtcccagctactcgggaggctgaggcaggagaatggcgtgaacccgggaggcggagcttgcagtgagccgagattgcgccactgcactcccgtctgggccacagagcgagactccgtctcaaaaaaaaaaaaaaaaaaagaaatatgaggagttgttattgtcaactaagtgcaacagttctagaaagctagcatttctgagttaaaaggttttataacttgttatagacttaattttcagtggggagattaaaatgtgacagatggaagaattgcttggacaaaatcatgtagctcattttttggcagattcaggattcctagttgatttttcattattagtttgcctttccagtggtttctcagccccactgtgctgccttttcagatcctgtggaaaagcacataaaggataagaggttaccttctaatgacaatacaaattgaagactgtccgtttagcgtttataatatgtgcagcctattacaaattctataaaataatgatgcaagtttcacaaagagataaacttttaaaaatattttcaagtattatatttttaggaacactgaataaaaatcttaatatacaaatcctctcttgccaacataaagttatatgcatttgtgatcttacatgtgatacagtttattaaagactggaaagtgactgatactcatttaagggtttctcttcatttatagagtcaataactttttttttttttgagacggagtctcgctttgtcgccctggctggagtgcagtggcgcgatctccgctcactgcaagctccacctcccgggttcacaccattctccttcctcagccccccaagtagctgggactacaggcatctgccaccacacccggctaattttttgtaattttagtggagacagtgtttcaccatattagccaggaagaacttcctaacttacatcatggactgtcacaacctggattacaagatgttatttatacactgacaagttggagttttacaaaacgcgatttgtaatataaactagttagataactcagagggttttattggccatatttttgtttatgctttgtcacaggctttagtcattgcttccatgtgttttcatccttcaggatatcttcaagaagcctacttatggaccaaacaagttctgaccatcatggagaaatctctggtcttgctcagggaggtgacggatggctccctctatgaaggagttgcgtatggcagctacaccactagatcactcttccaatacatgtttctcgtccagaggcacttcaacatcaaccactttggccatccgtggcttaaacaacactttgcatttatgtatagaaccatcctgccaggtatagtgaggagtcagaagtgtgaaaacattaaactattgtaattttttctgattatgaaaatgagctagactaggcagagaaattaggtccttagagtttgtcatattgaaattaaatagatttttttaatcaaagaaaaattgaattcaagagttgcatatagccagaacattttggaggctaatgtgagtatttatgatttaggtattataaagtttggagggttatggattaaatacaatttctaggcccctcaatactttttttttatatatccaaacttgagtaatatacgaactcatcttcatcattgcaagcaaaatataaacatttgtgattacctgtcagttttcctttatatgtgatccctgatcaatcctattttaatttttggttttcagttttttctttcaaactatacagacatgattcaaaatgaaagattacacctacacatttaagttggagctttagtattgtaatattttattgaagtaaatagtatagaaaagtaaacaaaaaaagtgctgtaaaacttgtaatttctttattgctgtgtcatttagccttctaagagaactagctctaaaaaaaatatatacatgatttaataatgtattcatttccagagaactttgtaacctttttttatttctaaaacaggactaagatgttagaacaagttataaaggaaaattttatcaggatagattcccccccttccccaaggaaatgcaatttttagatggtgattctagacctacaacaaataatatagtatttaaatcttttggctctggtagtatacatacagattaatagaatctccattattggactaattcaaaaatattgcagagcataagaaccattttaagatttagtttagacttacattcaaaaaaatactgctttgttgctttttcttagacatgcaggagaggcctgttttgcaattcatcctagtaaacaaaggctacctgaagcaagggacctttaagaggtttcagtgctttgtaatttaagctgagatctaaaggctaactacatcaggaattgtgtttgctgtgagctgtgtctgtggctacttcctaaagtggaaaagacagtatgaacatgtctaagagcagcatttatatgtttgtgttaattaaacaaacttttattgaacatctgtgtgccaggcactgtagtaggcagaggattcaaagaggaataaaacacatctcctgctttcaaggaattcacagactagtagaagattcagaaaatatcattttaaaataaggtatacttacaagatcatttactaaattattaggaacaaaaacattagctgtaaattacataaatataattgtggtaacattttagaagaggttctatgttaaagcaatctgttttcaacttcatttctctctttttttttttttctacagttgatactctagtagcaatttttttgtctggctgagttttctatcttgctgcttcttttttcatgaacacgtggagcatatccagtcttacctgcttttatttttcttccctattccaaaaatgatatatggctttatgatccttgcattttctgtcgtttaacttccagcagtacatactggcaggagctactccgggaattaaattttcttcctgtagaaactcagtctctcccctgaacttcgtatatagtataacttacactttattgaagccaaactgaagcatgttattttattatcttggcctagaatgcatgttgagttgtgggagagctagtgttcattccaggttcagaaacccaaactgcacaagaggatgtcccatgtatatatgcaaatataatcacgtatagcatgaacattggaaaatgaggaaggcagggaataggtgtagcactaatgttaccaaggacaggttaccacataataaatacaagcttgcacacaacatatgtggaagaccttttgagggattctgactaactggtctggaataaaatgtgaggattgtgatttttcttttattttatcccttccattacacaattctaatttgcaactagatttgaaaagtcattgtttagacctatataggagtgtgaagttttcaaagtatcttaattctttccaacttatttccctagggtttcaaaggactgtggctattgcggactcaaattacaactggttttatggtccagaaagccaattagtgttccttgataaatttgtcatgcgtaatggcagtggtaactggctagctgaccaaatcagaaggaaccgtgtggtggaaggtccaggaacaccatccaaagggcagcgctggtgcactctgcacacagaatttctctggtatgacacattgggctagctttaaagagaaatggtacccaagggtactattcatgctatgcacttgtttttttgcatttaaaaagaaaaactaaaacactttttaaatcttttctccatgccacctgagtatatgaagtttcaattcaactcatatcactgtttttgaaactcttagaaacttttcttttttaaaaaaaaatttcaacttttagatacaggggtacatgtgcagtatacccaggtagtgagcatagtacctaataggtagtgttagaaacatttctttatgtttaacatctaattactgttttcagtttttggttctcatattagagctgtcctacacttgcactatttcataaataagcatgttttgattttacatcattttttgaaagcatataaaacaaaacacaaaatttagactaggttattctgataatcacaccaaaaaaaaggtagtaaaatattttgttttggtaaatggagcattataatcttctaatagcaaagctgttactaaattttcaaaagtgtttaaaagtgtttgacagtatttgacagcttcactttgataataaaaggaccgtataaatttttttgccttaatcttttaagcccagaaagagaagcttgggtctcctttttaaagtattgccaaatatgttgttggcatccaataagttaaaatcaaaattacagggaactgattaatcattaatccctgatgtcttttcaagctgttgaaatttgcattcaactccaaaacaagctttcttgtggtttgcttctctttatccttttttttcaaaatacaaaaaaattaaggaggaaaaaatattagtaaaatggtgtctatagtttaaccaacaatttaagattattttcatagataaactaaacatattaagatgcaaccatccttgagttctctcaggagtatgacataattacttaatagtgtaacccataaataagttactcataaatattcaatgaagagagttctataaagctaactacaggattaataggtcagattaatgctaagtctaacttaaaaatctgcctttatagcaatatgcaaactgaccaaaaactgagagtaagatggccaattcagcttacatctacactttttaaatcacattaattaagccaacattatactagacctaagtagagatataatttctgatgtcttgaaactgagactctagaacaacagatgaaacagtcaatatcaaacaccaataagattaactctaggtgattgatttactttagggaaaagtacatagtgctaataataaacatttatcataaatgaaaataagaagtcatttattgtccaagaagcatggcatcatctgcagattaaaacaaaaccaaacctttggacctggctggtcagtagtaggcacaattataaatccctcaatataagacagtttgctgaaacttcatccatttatattctgagatgtggtgttggtgatacattttatctaatatgtgaagttctcctctatttcagtttattttttcaaggaaaaaaatcttgagggagaactcttttcaataccaaacattcaataatatcagttactgcagaactatactttattacaactcaaggcttgttagagtccagattctaacatggcatttctagaagaggagcccctcaaccagaaatttggatgaagtgcttaaatccatgaggcccagtagtttgaatggtcactctgacatcatcaagtgaagatagtccatgtagagattagagcagaaatcatttcgggcccaaacccaaggatcacaaatgataaagaaatattcctcttccagtcaccaagggtttccctttgtgcatactggttgtccttggatatttttagaattgtccctaatatactctgcactgccagtgctctgggtagcatttgtgtgtcgcatcttccacattaccatgttatgtgttattttcactgccatcagaaaaccatttaatttttcaaaattaatttcaggtatgatggcagcttgaaatcggttcctcctccagactttggcacccctacactgcattattttgaagactggggtgtcgtgacttatggaagtgcactacctgcagaaatcaatagatctttcctttccttcaagtctggaaaactggggggacgtgcaatatatgacattgtccacagaaacaaatacaaagattggatcaaaggatggagaaattttaatgcagggcatgaacatcctgatcaaaactcatttacttttgctcccaatggtgtgcctttcattactgaggctctgtacgggccaaagtacaccttcttcaacaatgttttgatgttttccccagctgtgtcaaagagctgcttttctccctgggtgggtcaggtcacagaagactgctcatcaaaatggtctaaatacaagcatgacctggcagctagttgtcaggggagggtggttgcagcagaggagaaaaatggggtggttttcatccgaggagaaggtgtgggagcttataacccccagctcaacctgaagaatgttcagaggaatctcatcctcctacatccacagctgcttctccttgtagaccaaatacacctgggagaggagagtcccttggagacagcagcgagcttcttccataatgtggatgttccttttgaggagactgtggtagatggtgtccatggggctttcatcaggcagagagatggtctctataaaatgtactggatggacgatactggctacagcgagaaagcaacctttgcctcagtgacatatcctcggggctatccctacaatgggacaaactatgtgaatgtcaccatgcacctccgaagtcccatcaccagggcagcttacctcttcatagggccatctatagatgttcagagcttcactgtccacggagactctcagcaactggatgtgttcatagccaccagcaaacatgcctacgccacatacctgtggacaggtgaggccacaggacagtctgcctttgcacaggtcattgctgatcgtcacaaaattctgtttgaccggaattcagccatcaagagcagcattgtccctgaggtgaaggactatgctgctattgtggaacagaacttgcagcattttaaaccagtgtttcagctgctggagaagcagatactgtcccgagtccggaacacagctagctttaggaagactgctgaacgcctgctgagattttcagataagagacagactgaggaggccattgacaggatttttgccatatcacagcaacagcagcagcaaagcaagtcaaagaaaaaccgaagggcaggcaaacgctataaatttgtggatgctgtccctgatatttttgcacagattgaagtcaatgagaaaaagattagacagaaagctcagattttggcacagaaagaactacccatagatgaagatgaagaaatgaaagaccttttagattttgcagatgtaacatacgagaaacataaaaatgggggcttgattaaaggccggtttggacaggcacggatggtgacaactacacacagcagggccccatcactgtctgcttcctataccaggttgttcctgattctgaacattgctattttctttgtcatgttggcaatgcaactgacttatttccagagggcccagagcctacatggccaaagatgtctttatgcagttcttctcatagatagctgtattttattatggttgtactcttcttgttcccaatcacagtgttagcactgaagctataaattacctggtcattttgtgatcacaagagtctatgcaaaaaaaaaaatttctttaccccagattatcagatttttttccctcagattcattttaacaaattaagggaagatattttgacacaagaaagcaggaacgtggagaaattggagcaggaaaagaaattatcaaagcaatagaaatagcttggtggtcctatggtgtttttggaagtatttggcattgctaattgagcagtccatatagtactacttttagaagaaacaaaaagtctattttttaaagtaatgttttttcttatgagaaaaaggtttagatagaattgggttttattaatattaatttaatgctattagcaatttccatatactatattgtggaaaagactgaagaatacaattctgagaaatataaaaaaattttaatggtatactcatgttgaaagataaatgttgctaagtcctggtatgatggtgtgagcttccttggggaagtacttcttgagttatgtaactaacaggatgttttactacagatctggatggctattcagataacatggcaaaaaatgatagcagaagatcattaaaaacttaaaatatattttattagaaaacatttatctatgaatgaatatttccttgatgctggtctctgcacacatatgcttggttacttgcatgcattcattggttgttcaataagtgagatgattacagataatactgtattttccttatatggaaaaccgttatagacccaataacaactaaacctttcaaaagaaaatattttctattatgaatgttgattttcataccaaagaagatggagagtctaaaatttggatatgattcttatgtttttttaatagaaaaccttcttcaagtttattttcctaaataaacatcataattgtgaa

SEQ ID NO: 138 - DNA, 35549 bp, Homo sapiens
agttacagggagcaccaccagggaacatctcggggagcctggttggaagctgcaggcttagtctgtcggctgcgggtctctgactgccctgtggggagggtcttgccttaacatcccttgcatttggctgcaaagaaatctgcttggaagaaggggttacgctgtttggccgggtgagttttattggcaaactgtgcctctgggtgatgtgtgcctatgctttacaagaattgcctaatttcccaccccctgcaagccgcaaatgaaaaggattgcaggagagatggtgcatttgtgttggaattgactggagattcagagggctttttatatccttggttaaaaggtggatatatactctggctggggaggtggggggccatctgagagcatctagaaaccctaatgcatccagattgaaaggaagaaaggaatctagatgctttttcccccatggaaaatagctgtgcacacacagctggcaggtggccttggtaagcaggttagggagaagctgccacctgtggcagagccttggccagccgggctctgggtgtggcaagcctggtcagcaggcactgagtagcacttcctctgccaccattgagaaccaggcaggaggccagaggcagtgagggacagatgggttgggtttacctgtctggcagtatatggtgtggctgtgacctgggtggttattgattaaactattgggttcaaaagaaaggaagaagcgagctgtagcacccaatatatgcacttttctgtatgtgtattagactttattaaaaagtttatttgaaaatcacaaaggaagggaaagaaaaccctgagttagatatgctcatatttctaaagtgcttacttagaacagtcctgagtatgttgtgatcacataagtgttggttaaataaataaatgtccaaatggcataaaacaaagtaataatttctagagcaaatctaacttataaaatgacctgtggaggaaagaaaacactgccatgtctttagacttttttttctacttgcatatgcactttcatttataaatctttatctatctatctatatctatctatctatctatctatctacctacctacctacctacctatcagagttacaagctactttagtgcagaggtggtcaggtcttccctgaaaggttgatgtgagagttaaatgtgatataataatagtggtggcaatttgggcactgggcccttattatgttgcagacacgatgttaactgctttgtacatattgtctccttcaatcaccaccataaacctttaaagcaggcattactatttccttttgcacctgagaaaactgaagctcagtgaacttgagaaattgcccaaattcacaacaaaagtaagcagggtgattaggtttgttggagcccagagccagagtgcctaaccactgcaccatactgcctctcacagaccatgcatataaagtccaggcaaagtgcttggcatataacgggcactgtaaatgcagtgtttacaagtacacttcattttaatctgataacacgatagttttaaaaagatcattgtttgaagatctttttcaaatttatttttacttaccgtaagaatatacaattagctaaaatagcagctcctttcaaatcgtaaaataatatagaattatttgaatcattgagagtgatgagcttctatgacacagtacactagaggtagggaagtgtgtgtgtgtgtgtgtgtgcgcgcgcgtgcgtgaactgctgcattttcaggcagaaacctttaacatccacattcctgctccctgtcccgtgcctcaaggctggcctgcgcacgggagtctcagttgggcgcgcctctgccaagccgagactgaagggggctagcctctctccctgtaacgctgggcgggccacgttaggaggctatgaatcagctgatttccttggctgctccaaccccacctcaaatggccacctcgcacccgcccgccaaaccccatggccaggactccagccaaggctgacagccaagcccgactgctgcaggaacactttgcctagagcttattcggtggtagtctggttttgcctaggctaggaggagcccaatcccagaccatgctatccagtagtcggccggacttttcttcccctaattcgcacccaagaggagcccgctagatcaatccccgccaatcctaggaagctggcatgcttcgtaggtgcagacagtaatagcggggaccggcgcggggcaggtgtgtccggctaagacgccaggacagggcaggggctccaggacccgagaggagagggacttcttccagcgctcaagcgcccgctgccctctattagtgggaaaggaatccagcctcagccccgcgcgggcgcggtcggcgtcggcgggcccagaagcccagccctgggcatccgctgagctacatttggctgggtcttcccagagtgggctgaggagccagtttctcggtcaacactaggtctccacggggccaggggagaagggaggtgggaggtgagaaagctcagccgcctctggtttcgagtaaaagtcgccgcggttttgcagggaccgactttttcttgaggcgcatttaaggccaagtgactgtctcctgccctccctctctcctgccccctctcctccctgagtcccgccctcccgcacacgctgacccagggacacaccctactgcagcgacgcaaacagggcgttgttcccgttaaaggggaacgccaggagcctcccactgcccccttgcttcgcgcgcgcgcagccccgcagcgcagctttggcggcgccagcagcggagccaacgcacccgagtttgtgtttgaggccaccctgaggatcgggacagctgttcctttgggctgtaagtgatttggtggggagagtgaaggagatggaggagaaatgtgggcatcttccagtgagggtgccagaaagcgcagcgcaggcgcggggctttggccagctccctggggcttctgtttaggggcacagggtcccctgtgtgtcctgtttccctccaatgggtcttggagtaatacaacgaggagagcctttatggtctataagaccttacagggcaagggtgatggtgctggtgtctggatagcggataagggcggcccagttctcgccttgctgaagaggcgttgactctgggacacactggcaaaacagtccctgtggcggacatcccgagagtgttggactcctgtggttccccagttcccagcctcctgccatcggcttaattcaaaccctctgggagtcatcagaaatccttgtttatttcttccagtgcattccagagtttctttgaatgtgatgcttgtggagaggaacagaggggcctgggattgggtactttccaaactgggttattgaaacgttgtctccctggcccaagactctgcctaaaatggtccccagagtctcagccagatctttcacagccatgcatgtcctctaacaggtcatcccagccttcagttcccccaaagtttaaaatgaggggcgaggaccgcattacttgggataaatgtcctgccggctctgaccggctgaaattctcggactcagccttttaccctctgtctctctctcccgtccgctggacatctactcccttcggtccaggctcctgggctcctgtcccaccgcacccagaccggagctcaggcttgttggggttcgtgtcctggctttgagtgcctggggtgcagactggacccctaggcgagcacgtgggtctagcgcaagagcagaatgccccctgaccccaggggctgcctggggaagcgcgcggtggacgggaagcgcagggtccgggcaaccctctcgagccattcttttctttccacactactctggctctgcaccacctctccggagccgccagagtctgcgcgaggctgagctggggccaggaccgttcctctacgctggcagagttgggtggaaacttggagacaaacggaatgcggagagcactggggtctgggaaaccagcctcctcgccgctgtctcccccaccgcatgccacggctgtctccaggtctcagacggaaatctgggcacctactcccctcacccctacctccaccccataggggaattcaccatctgaaccggggtctcggagaacgtgacctctcaccttccagggaggtcgccgggaggtgcttggggtgggtggaagcgtgcagtggcctctgctcatattttctggaaacccctccgttccctgggtggttttagacgtgcgaaccgcttgttttgtttccaaaagcaaaagatgttccgttgcaggcgggcccggctgggcgctgggcactgggcgctggtcctgcaggcggctgctgccccctctcggcggcaggcggcgcgaaggctcctgacccgcgcgggcggtcgggctgcgggcgctgggccaggccgggccttccgctagtgcgcgggaccctccctctgcgcgcgcctccgtcgctcggcccagtgcgttcggcctcacgcccagcgctctcctcgcaggcagaaactccgctgagcagaacttgccgccagaatgctcctcctgttgctgagtatcatcgtcctccacgtcgcggtgctggtgctgctgttcgtctccacgatcgtcagcgtgagtgcctggcggggaggctccctgcgcggcccgcccttccccatctgggttcccagcccgtgctcctgctggttcaggactgtgttatttgcagacagttggaagtctcagacgtcccagggaagtttctggcaatctgcccccttccagttgctttgagaaaacgagagcagattcagtgataggaaccaagcgagcgctgggctgggttagctgcgcaggtctctatttaagccaagtaacttcagagccgatctagggtccccgaccttcatttgacaagattgtttaacttttttttttcttgatgcagcctcgttgaagaagaggagtatttatgatttttttttctccaaaccatagtcagatgggtgaattaatttataaaacacccttttaggacttgaaattggaaagttaaaatgggcttttctggaaaagagttcacaggtcccatgtcggctttatggcatgaacacaacacattgttagtaaagcttccactggtaggaacaggccatcagagtaacttctgttacaaaactgtccagcccattagatcttaaagttattttcttggcgatgaagatgagcagacattcaggcagttttccagtggtggctttcacttcttaatttaaggcacattgtaagcatgattttctttttcgttttcttttcttttcttttctttttttttttttttttgagatggagtctccagcctgtcacccgggctggagtgcagtgccatgatcttggcttactgcaacctctgccttccgggttcaagccattctcctgcctcagcctgggattacaggtgcccgccaccacgcctggctaattttttttttttttgtatttttagtagagacggggtttcactatgttggccaggcttgtctcaaactcctgacctcatgatccgcccacctctgcctcccaaagtgctgggattacaggtgtgagccaccgtgcccggcctgtaagcatgattttctagtctctgtgagaaataattatgttggggatttgtgacttagtttaacatttacaagcatcttcacagtatctccattgtgcctggtgatgatgatatcagactgataggagctataaacaaggaaatagactgagagaggcgggcttggggaatgatcccgagatgctgggaggagagaaggcttgaatgcaggtgtctaaggttgagttcatggctccttctactatagtaaacatctctgcacataatcgtttctgtgtgcatgtggaacttctccatttacaaggtgcttttaagtcataaaacgttggctcttaccatgcaggggtgggcggtgtggctaggtggatgcgggtgcttttcgccatccctgggcctttctccttccccttttccttcactcctccctccctccctgactcaggatatctatctgattctctctagcaatggatcgtgggcaatggacacgcaactgatctctggcagaactgtagcacctcttcctcaggaaatgtccaccactgtttctcatcatcaccaaacggtgaggctggttttgtgctccatgagcttgtcctcagacgcctgtaacacgtttctcagcccagagctggaaacgcttattggaagacacaagccagaatgtcgttgctggggtggggtgggatgtgacagggagccatgagtccagggaaaatgggaggggtggtgatctcgctggggaagctgagatcctgggcatcattgtgattcactctacctagagacatgcccttagtgccctcctgatcacttaggataatgctttttgtgattgaaaaaaatatcgacctgggagctgtgaaggtggtatgatagctaagcctttggcagacccccttgggacattggatcaaacgtgtatctttggtttggtggctgtctctattcagaaatgtcctgcccctttctgctgcagtgacagtggggctagctcactgcaccgtcagttacatggacacaagactggctgcctttccaggtcttgggcctcagtgatgccacctagcatcaaaacctttgaatgtttccttgttgcaagatggggacttgaagctatttgcaaaaccctaagctaagccttggggtccttaatccagaagatcgtatttctcctctgtcctcagcatctttgcttgtgagatatggaagccaggcttcatgagggtcaaattaagggataattggcagcagaagcaccaactaggtacccaaggcacccagagggaaaggaacacccagccaggagccctgtgtgtttggatgcagacaggtggaggtaaacaggatgagctgttttggtggctgggtaggccatagcgattgatgttaagagcccgtggacctggatccacatgatcttttgttccagaagatgtgtcctcaggctggaaggacctagagatacagcagagctttcctaacatcctgggtttaaaaggccacggaaatacagctttaaatgttgctggagctactcatagatccagtatatatgttcaagatgctacaccagacgagagaaaccagtttagatccagttcagtaaaacaggcagtgaagtggcctttggtcctggctttgcataatccagttgctttgctggactttccctcttacagctcagtacccagtaatacccaagcatgtccccagctgaagcattataaaccaaattccttgaaccacagtacaaatagaaactgctaaaataataatttggtaatttacatggagaagatacgcaaggagtagaaaaccctgctttatgtttttaccttctgggttggggagggagcagagaaaaggtcccagtcctattggagtgagaacagtgcttaatcttgtctctgagtgtgtgaaaggcattgaattaaagccatcccagaaattacgtggtgggtttgcatggtgagttggcaactgagtaaatgaaatactcatgagtgcctgagaatgtgaccgtagcactgcttgtccccaaagccacagcatccggtttctccccctttagggtctggctgaagttcccggagcactccggatgggagtctccgtactcgctactgacacctggtggttacaagtagtgactcagcccgaaaagggcaggctttggtgctcacaggcgccatccccaagtggcatctggccacgcggcttggcacagaatcctggactcttgggcccggaagggggcagttttggcaggcgtgttaaaacccggcgaagtttcagcagaaacgaggcggcagaggagttgctaagttgtgcttaaaccatctgcaggaaagaaagcaatattgacctgtagcatgttacagattgacatttggtgtcttctgccgttggaaatagctgtcagttggtgctagaagcagatctcaaagaggcactagggttattttaatcaggaaacttcttatctctcaacttgttccttctgtgccaagctcatgttcttgagttcatttacaatgcctccttagtgtgggtttcaaatctgcctcgttgctttccgtgaggaccccagagtgtctgttttccacatctcccttctcagctctcacaatcagggcattttgaaaacatctggacactgcacctgaacatgctgggtttgttttcacgccactcaggcttaatctaaatttgaaatttccatttacacttccccagtagtggttatctctgccgctatcttccccaacgtggcagcacttgctacgacttcagccttaagtggcgaatcctccagggcctctttgattgagtttaacaattgtggctgcagacaataagctgaaaaaaatgtgtactttttaaaacattatactgtctttacaaatgaactatgctcattgcgaaccatttaacttgtctgtatttgctcttagaaagtatatttgaaaaaaaatacttgttaagtaatcaaaagtaatttgttattgacatcgatttgtgaagaatatgttgcaagtgtgaaaaaataaatagtggtgcaatctcggctgactacaacctccacctcctgggttcaagcgattttcctgcctcagcctcccgagtagctgggattataggcgcccaacaccacgcctggctaatttttgtatttttagtagagaggggtttcatcatgttgggcaggctggtctcgaactcctgacctcaggagatccacccacctcacctcccaaagtgctgggattagaggtgtgagccactgcgccatgtgacttggtatttttttctgaaaggactcatttttctggtgcatgaccatgacacttcacctctctctgggggttgccactcatgttgttttctacatgaatggggcctcctggcatcgtgccatgaggcagtctaacatctaggttgtgtagtttgaaagagacacaccagatcttgcccccaggctacatcttaatattagaaatagttttagatttttaactaactgactttgactccgcctgccttctcgtttttctaaatgtgtttgtatactttctggcaccccctccttatctgcctcgtgtgggcagaggtaagagaggcttagtgtggggatattcgttatgatattgtatccagtgcctctccggcccagggaatacaaggatctggaatgcatgggccttgccttgatggtcccgagcctggtcgaagagtcaggagatagatatggaagggtgaatcactcccttggaaggcagagcaggccaggtgcccaaagggaggcaggcagacagcgtctgagttcagggaggaagcggatgggaaatctctggtgggaggtagaatctgatccatcctccaaaggatgggcaggatttaagtcaatacaggcaacggggaggagaatattccctgtgacctaaggtaagggtagaacaaggcaggggatggggtagactggttggctagtgttctggttaggattaggattgattgtgtataagagaacatcttcaaatgataggggcttaagtaagatcatttatttttctctcttttcaaagaagtctggaagtaggtagcctgagagaggtatggaggttccatgaaattgtcagagatgcagacactttctagctcatttctttgccatctcttgggtttggctgtcatcttcaggaaacaaaaggctgctagagctccagccatctcatccatgattcaagcagtagggtggagaaaggaggtggggaagaatgaatctccttttcttttaatgaaatgtgacatggtcacacctacacctatttacaagagaggctgagaaatatagtcattcggccttgggggaagcatggcttttcaaatcatagaaacctggcagcaaatacctctctgtaagcctggtgtggaatactttccttgagggtttgaccatcccctcccatacccaatcatactcttttgcaatagctcagttgggccctatgcagttccataagtcccagttatttcagcattcttcaaagagtccatctctgctgcatcctgggctctgtcagccaccccaccattctcacatgggctcttctcagaaactttaggacctgttgaggcttctctctctctatttctaccacctctccaggtataagtaagtcttattattattattgagacagagtttcactcttgttgcccaggctggagttcagtggcgccatcttggctcactgcaacctccgcttcccgggttcaagcaattctcctgcctcagcctcccgggtagctgggattacaggcatgcgccaccacgcttggctaattttttgtatttttagtagagacgggctttctccatgttggtcaggctggtctcgaactcccgacctcaggtgatccacctgcctcagcctcccaaagtgctgagattacaagcgtgagccaccatgcctggccatcttattattatttaatgagtccagacctctcttctgaatcccagacctgtttatccagctgtctcctggccacttcccttgggatatctaagagaggcccccaagtcactaggccagagacagtccttatcttcctctgccaattcaacccctctgtcactttctagtattttagtgaatgctgcttcaccagccagcaagccaaacatctagagtctgccttgacttgacgcgtttccttctttctcttctcagcattgtcacgggtccctcaggccaccccattgttccaatgcctgttgcccacctgtggtcacgctgcttcctcgtttgtcagaggcgccagggcagcctcctaactagtttgcctgaaccctttcttgctcctctgtgactcatttttcatatggaatccaggctgatatttaaaaaagcacaaacctaattatatcactcctcattttgaaacctttcagaggccgttcattggtcttaatcttcagatgaaaatctttaacaaggcccatcggaatctacctgaatgatccactcctgcttctgttaagtctcacctcccatctctcttcccctcatcttggaatttcagcgttttctcacgtcctgaaatgtgaacttcccacttcgggagtctctccatttctcttctgatctttcatgcaggactatttcttgaacaactctcgtgtaccagagactattgcaggtgctaaggttacaagagtgaacaagagcttatgttttactggacaaaccagtcagtaaacatggagaatttgggggcaatggtaagaactatataagacagggtaatgggataaagagggattgcagtggtgaaggaaggtctccttgaggagtggccaggagccagccatatgaacatctcggggaggttccatacagaaggaccgtcaagtgcaagatcgctggggagggaaggagcttggcgtagttgagggacagagggcagggcagactagtgggaacagagagtgaggggtaagtagaatcacagaccatctcaaaggtaccccccacccccactaggaaggagttgggtgcacatggatgcatttctaatctttgtgatttccttagacctgctgtcttccacgggtttctcagtggtccatttgattccaagttggagtgacagtccagaagcctctataaggcagaatatatcagaaattgtacaaggtagaaatgcatcggtatattttcagtgattattttgggtgacgggattcttatcactttggctgttttctttcttttgctgccttacctgttttcctcattgagatcttttattttcacaatcagaaaataactgtgaacattttatgttagaaaattggttttgagtagtaagtaggttccctctgccttgattaagagagtggagccctggggcatggcacgcagggtccatggcgtcgctttgaatgaggccagttcctggagctttagtttgcaaactcatacaatctggaaggctctggtgagggggaggggtgtgccaagcctcctccccaagaccctatgggtgagtttaaaatctactgacccaaaggattcaggcaaaacatttgccctgctattgaatgaaccagtgctttttgttttgaagtctccaagatccaaatatcaagtccaagttctcacaagcattcccctgctttttgtttaatttgtgtggacctgacgtgtagcagaatgggtcagaatactggaattaagccacaggcggcttgggagcccaagagctagaagggcacagtcctggcttgccctggcccctggctggtcttcatcagcttcagtgatgaggcaggacccaggcagtttgtcttcagtaaaatctgtctctcagggcctgtccctgctcacaaagtcctctcttgtctcagaagaaaaggtagttgataaactttttcatgctgaggtgttaggcacaaaaaatgtgcccctttttgaatcacttttgtttttaaaaaggaggccagtgctcaacaccaaagcatgaagggaattgttgagctttcctgtaatctgtccccaaacgtccttggccacctccattgtctaagggcagtacctgcagcccctcatttcccagtgacaacaggtgggtctgctctgccacagtgtgtgggcgggaccagcaccagacgctgagaagatgaccacttactactcttcttttccatttaaacagcagcagcagcagcagcagcagcagcagcagcagcaacagcaaactcatgactatcaataggttgtgtgaggaattagatcaatgctttgggttgaaaattagagaaactaaatcttgccagtctcagcagcccccaacctgagcccttggtggtctcctatcatcgctgtcttcaaaacgatcccagacttgtttatcaatttggtgacactgtcattttggcaaggacaccagacaatttccttgtctgtggctcagcttttggccagattttagaaaacacgggagaccttctgcatttatgggttcatgttttacattttaaaatcttcgtggctccctcagccaacccataatctctacccaaggaatggctctggattttacaggctcttatgagatgctgagaccctggtggtacaagggaggtacagaggacggaatgtgttgtcaacatgccaggatttcaacccttagggtttctctgatgccaatacccaggaattagtatgaaatgtttgtttgaacctgtgtctgaactgtatgacctggaatctatagtctttgctttaaaaaaacttcaattgtatccccaagatttcaccagcaccaagaaaacatcccttgcatttcaggagcagggactggccatggtgcagcctgaggttgtggatgttgatctttggtgcccgagagaaggctgtctgggatgaagccttctgactgtggtcaggtccctgccagtgctgggggccacatgagtgtgcagtcatccacacacaagtggcccccaacactggcagggacccggagtcatctggcccatccctccttcctatcccatcgagccacagacccctctgcaatatgcctaccacatgttcatcctaccactgatggggaacttattaccttcaagagagcctcttttgtttttgaagagctaatagtgagatccattcatgtgttcttcaactctattgagcctgtcctatgtactgggcactgttctagaaatggggtgcacagagatgaacaagaaagagcaggtccctgccattgtgcagctcacaaggagttggaggaaacaggcaatacacaatacatgcatcactatgggtagtggaacatgctctgcaggaaacaaatagggtgatccaatggaaagtcatcactggaggaatgagctgctcagggaaggcctcttccttccatagtgatgtggtctgagatttagaagacagggaaggaccagttataggaagaaccatgggaagaaaattctaggaggtaaagggaagaaccaaggccctgagttagctgaagaaaggagggtggggaatgcgggagagagggatgggagcaggatcgctggtgcctcacaggctgtggtactgagaaggacagttgggacatcattgaagggttttaagcagaagagtgtcatgatttgattcatgttttgtaagctcattctggctgttgagaatgaattctggggagaggcaagagtggaaactggggaccagtgaggagtttgtggtcatagtccagactggacatgatgatgacactgagatgacaatgatgacaatgacaatgatgttaagaatacaaacagctcacgtaagtgccaggcattctttgaaaagcaatgcatttaatcctcacaagaactctaggaggtagctggtggcttagctagggaggggaagtagagaagaaaacaggtctcatgacagggtttgctgatgggttagatgtagggagttagggaagaatgattctagatgactctacgttttgggcttgagcaactggtgtgtaactgaatcttggactgagatggggagactggaggaggaacagaagatttgcgggaaggtgtagaaatcaggatttatattttgaccatcagagaggtcagcaaatcacttcaatttagaagtctttggcttaggggagaggtctgggctggaaattcaaagtcaagagtcattcctctataccgaagggtattcaatgttgtggtgctgaatacagttacttggggaggagttgagagcagaaggcagaaaaggggaacagggttcagagctaagtcttgggcatgccaggggttaacgagggtacaggaaggagaggagactggggatgaacagccagtgatgagggaggaatgccaggagatattgtcacttaagaaattacctcggctgggcgcggtggctcacgcctataatcccagcactttgggaggctgaggcgggcggattacaaggtcaggagattgagaccatcctggctaacacggtgaaaccctgtctctactaaaaatacaaaacaaaattagccgggcgtggtggccggtgcctgtagtcccagctactcgggaggctgaggcaggagaatggcgtgaacccgggaggcggagcttgcagtgagccgagatcgcaccactgcacgccagcctgagcgacagagtgagactccgtctcaaaaaaagaaattaccttgttaaacccaacactgcccctcttttgtccattcacttctagttgccttcattcatgcctgatgtgctggacttgggttttatcaagttgcttggcacgtccttaaagaatttaaatctccacagtgcctcctggacaatgactgcagggtgacccccgtctctcctctacacgatgactcttcaaacagttgacgattgcagtttttctttccttccttctttcagtggcttctctggtgctggtcccagctgcataagcagggcctcttcttgcccttctgaagtttggtcagtggtttggcttggcaggctgatgagcagagaataagggaagccgctctctctttgccacaccattctccttccaccctctctagtttttgtggattctaagtctgaagaatggtggtagaataatttaattcattagattgcaagcatatcattgacttctctgcacccccagtgtgttgtagtggaaaaactagtagtctgggcatcagggaatccttgtttttctgcaccgggtctgcctgtaacaaattaggtaacctggggcaggtaccctggtttcctaaaagcagagcaggcattgaggtaggacctgaagttgaggtaggacctgcacattgcatgggtcccggagcctctgttcatgttcaggatgtaattgtggcatcgagggatcctaaaaggaggtggcctctgagctgggccttggcaatggggtagaattgcagtaggcagagggagcagagatgggttttgtgcttgtaaacgggcattggtttactgtcactggtgggggtagcagctcttttgttctagctcttcatttccataatgcgtgttcttttttcatactttaggggaaagaaggaggagaactctattatttctatggggagaattcctcctaaacctgaagatcttaaaactaagcgaattattccctgttcattctccactgatgcagttcatgactgcaattgcaactgcctttcccgtcattttctatggccaaactcagtgtttttaagtgagctcttcttttaaaaaacaaaaacaaaaacaagtctcctgataaatccgtttgaaagacactaagttttgaaagttaagcaggctttgatcattcatggtacattgtgaattaccaaggagggagattgatatccttcatcgtacaatgcactcccctcctttttcttttgtatctggtggagtaagtcttccaagagcaattcttagagaaacaaagcctactctgtttccctgtttctagagttttccaacaagggtataaaaaagcctcagacagcttactattatccagtaacctcaggtacctcagtggctgcgtgttattccctttagaagtccaaaaactcactagcagagcaagaatatggatgtcaaagtgcagaactagaccctgacaaactagctctgtgcctgccacaaagcctcttaattaggaatgcagttcattgaataactgtatcaaagttagctggaataccttgacatgaagattccttccacttactgagcagtttgtgcccactagtggccagacacaggctttgctctagctaaaatacccccaggattacctgttgagagagccgcccacgtcaccttcatcgcctttgtgagctccatgctggcacatagttgtctccatctgttttgctttccgcatgaatcataggcaaagttagcctgaccagcaagcccatttcaaagccaccagctgggggagaagttgaagcccagggggcaagacccacgctgggctttgggcatgtttgagctggtgggcgaagcatatgggcaaaggccacattgtttaggatggaggcctttcagagactcagctatttctggaatgacattcatactgagaaataaggaaaatggcgatctgtgtgatggttgtgggttgggaggtttgggcgtgggagtcctggtcttggggtcatgtgttttgaaaacagtctagcactatgcaaatgggaggtgttaataactctttgcctctgtgatttaccctctcatggctttttctctcttggcctctccaaggtctcttctgactcttgcaactgtccttcctttcactttcaacaaaacctgttctcttgagtcagaacagttttatgaattgcccagagtgggacttgatatggggcagggttggttccatgctggtaatgaaagatgcacataaactgttacattgaaaagtgcttcatactttctgagcccttaactcactaggttgtaggccctgggctaagaatatagctgagggggctgatgtatttccttcattgctcagctgctcctacagcaggaatctgaccttgaaatgagctttgatctttgtgcaactcgagcttcccactatctgctgggggagctaggtctgggtgctgccacggcccatgtcagaaagctgtcagcagctcttataccggacactctcagaacaggaggcctgcaaagagctttagctttagttttgttgttgttgttgtttttgagacagtctcgctctgtcgcccaggctggagtgcagtggcgccatctcggctcactgcaagctccacctcccgggttcacaccattctcctgcctcagcctcccaagtagttgggactacaggtgcccgccaccacgcccagctaattttttgtatttttagtagagacgaggtttcaccgtgttagccaggatggtctcaatctcctgacctcgtgatccacccgccttggcctcccaaagtgctgggattacaggtgtgagccacggcgcccggccttttttttttttttttttttgagacgagtcttgctctgtttccaggctggagtgcagtggtgtgatctcggctcactgcagtctccgccttccgggttcaagtgattctcctgctccagcctcccaaatagctgggattacaggcacatgccaccacacccagctaatttttgtatttttagtagagacggggtttcaccatgttggccagtatgatctcgatctcctgaccttgtgatccacccgctttggcctcccaaagtgctgggattacaggcatgagccaccacgcccggccagagctttagtttttaattccagtgctcagcaccaaggttggatattggcttaaaacttccactggaaactccacaaatgtttagcaggcctccactttgcaccaggaactgagtgtggcctggaggacagcaggtactcaacataagttctactatttattgcatacttgcaaattgggtggggcgtggggaagagtatcgccacactggggcttgtgttaatctatagtttagccacttgggatgttggtgtcacactaggtttgatctaaatagaacaggtttgtaattgacagcattttcacttgcattatatttctctgaactcgaatcattattttctgtacagctgacttgttttgctgtagcagagtttggcagataatagcttgcatgtcgaatccaacctgcttttgtaaataagattttattggataaatggctattgaaggaatgggtcacacccactcatttacatcttgtccatggctatggctgattttgtgatacaaaggcagaattgagtagttgttaagaagaccgtatgacctgcaaagcctaaagtatttgctctctgattctttatagatagtttgctatctgtgcagatatttgcactctgactctgtagcacccttatgctggagaggagatatgaattgataccaaagttgtatcaaaacacttttggagttctggccaatgtgctaataacctggcttgtgtgaacattgtggctctcattttcttttttcttttttttttttttgagacgagtcttgctctgtcgcccaggctggagtgcagtggcgcagtggcgcgatctcggctcactgcaagctccgcctccagggttcacgccattctcctgcctcagcctccagagtagctgggactacaggcgcccgccaccacgcccggctaatttttttttttttgtatttttagtagagacgggttttcactgtgttagccagcatggtctcgatctcctgacctcgtgatctgccctcctgggcctcccaagtgctgggattacaggcgtgacccactgcgcccggcctgtggctcccattttcatactgcttggtgtgacccagatggaaatgctccagaacctggcccctcaataacagcctgtaaatgcttgtttaccctgttttctcacatcagccttttaggtggggttatttgcactatcctttaacagcgcttcaataacaactcttttgtttgatcattatgacaacccaataaaatatattagtgcctcaagtacgtaaagcagaattcaaggccaaaaaaatgtatgtggcaagttaggtgggcggtcagaagaacttggcaacagagcccagccctgcctgggctgtcctaaccagagcacataaatgctggagagagtcaggctttgcacgtgctcacacgggacccttaccttggacaggatcaaagccctgtcatttctggagtgtgtgatatctgctgtctcttactgcgctggttgttacctgtctattccagttctgatgaatggctctgattggggagcagcatcatctgagcttagaaatgtcctcagggccctgtggggttccctttgagcaacaacgagagctcttgaatcttgcaccagccttttggagctggaatggagtttgctttctcctgggctgggctctgttttttttcctctcgctgtccttgtgtagcttttgatcaatggcactggaggaaaggaaaatcccttgttgttttcctgggcatgtggaagcccagtcctgcccagaattccactagccctttgagttttggaatcctgactcttagtaagtcaatagagtgctgcatctgtttttacctttgtaatcttttaaattggttttaattatttaagtaatacaagtattataatacatgaaaatatcctcaactgaaaggcttcttgaccaaactcttcttcgttgcaacagtagttcctgggggaacccactgacatcaatttgacacaactttggctctttctctacgaatatttgcatgcctgtggatgtctatacgcaattacatagttttttggtgtttgttttcataatgatgacatgttgtgtgtgcaccttactcttttcattgtcttggagacctttcaaagactcttcattttctaactcatgatttttttaactgctgcaaaatatttcattgtgaggatataccataatttattttccctcatagaaatgctacaatcaatgtccttatttattttcctctgagtatatgttcactgtttttccaggatatagtagataagcacttgaacacatatagtgtcattacgctagaggtgttacaatttttaaactacttttaatggcaaaaattacaattacttttgtatcaacctaatatattctgccacaaaatggctggtcacaaaaggattataataataatattattattattcctgtgaatggtgtctgcaggtagctatcacttatttgttctgctgatattatccattttttttgaattttgcctattggctggatgaaaattggtgtcaccctcctcatgggtttctcttgcatttccttggttgctagtgaggttgggcaccttttacgatgtttattggctgttcatatttctcctttgctaatcacatggcttttcaattttatacttagctgttttctctttgttctgtctgtaatttaattttgttaatgatgcgaactagagatttaattttatgttttaccaaatgaatagccaacactatgtattgtctgttgtatttttccccactggtttatatgatgttgtgtattatctaccaaatttacatgtatgcttccaaagtcttattccatcccattcttttatttttctttcatgattaacaccatatttttgaattgctaaaactttataatataaatataagctttgtatgtctataaataaaatacattttattaattataattatatgttatataattataatataagcacttgaacatatatacttctataattatatattatataattatatatcatacttctatgatatgttctataattatatattgtatatatcatagttctatgatatgttctataattatatattataaagttacaattaattgtatatttaatttataccatatactgtaataagcaaaatatagaaatatgttttaaatctggtaggtggtatcttgactcattggttttatatgtttttctgattttctttttgttcatttgttcgttttggtttttagttgctgttgtgtttacttcaaattttttcttatctgtcattgctcattgttttttagatgaatttttaattgatttttttccagttccagttgcaatatggattaggacagcattgaatttgtagattattttggatgaaattggcatctttataactttgagtgtttctatccaggaacttagtatgtttctttagtacttcttttatgtacttgaataaaatttgtctaacttgttgatgtatccccaaagaaccagacatttttattaaatgtattttaatatttttttctgtctcattagtctgtgcttttatccatattaagtcaattaatttttggacttatttcattgttttttttctggcttcttgagttgaaagtgtagttcactctttttaaggatttttctagcaaatgcttagaagtgtatacattgtcctctgagaactgctttggttacaacccacaggtgtgccatgtggctctctatataattccttgctgaagaagtttttacttttcatcttgttttttttaatccgaggaattatctggaacactgtttttaaatttccaaatttattttggctagtttgtttttaatgtctaatttctgtttgcctttaggtatatgttgagcctacatcatttctgcttctatatttattgagatattctttgttgcccttatagtcagtttgaaaagctgtcccatgtgtgtttgaaaataactttgctatatagacacaagttttctatacatctattaggacagatttgttaatcctcttatgtaatctatattctttcttctttttggtctacctgacatctattttgaggaaggaagctaaagtcttctactgttattgtgattttaacaatttcttctcatattttgattactttttgattttaactttttcaggccatgttattatatgcataatgatttattttcttcagtcatagatcatgtaaaccagaagtaaagatcaaataaaccaaatctttcctctatgaaacaaccaaacaactctctggccacttttatcctttcaacataagttctattttttattattaatttatcttctttcttttttgttaacatttgcctgaagcttcttttcagaatcttttttgtttttgactgttgcttgttttaggtgtatctattatattagaatatagctacaatgtctctcttttttttttttttttttttttttgagacagagtctctctctgtgcccaggctggagtgcagtggtgtgatcttggctcactacaacctccacctcctgagttcaagcgattctctgcctcaacctcccaagtagctgggactataggtgtccaccagcacacctggccaatttttttgtatttttcgtagagatggggttttggcatgttggccaggctggtcttgaactcctggcctcaagtgatctacctgcctcagcctcccaaaatgtcttaatcaaagataaaattccatatcttatgagtgccttgaacccattcacatataatgtggttgatgatagacttactatcttaatgcatgtgttttatttattgtgcttatggttgaaaaccatcttcttcatctctggatcatcagagtcaaccagagggcttggctcaaagcagtaggtattcaacaaatgctcattgaataaaaatgtccttgatcctctaattctgatttgattcgagaaataacttatggcaaagagctcaattgtaatggggttgggactaaaattcaagttaatgttgaaagatgtttcaagaagtatttaggttatattattaaatattagacactttctgtttatatagatttaacatataaagattttaagttttctgtgtatgtgaggtctcgtagtagtttctgctgaaaatgacaggggcgcggggttaagggtgaagacagtatctcaggattggagaaggaaatctaagatattgtctccaccagccatactcctcatgaacatgcacatggaaggacatttcccagccaaagtgaatccctttatttgttttagtttcagatttgagtctcagatttctttgtaattccagctgcatctaccaaagtgctagataatttttttattttaagcaaacaatattatgagaacattatctttattgcaaagtgctcctccagaagaacctctatgctggataaagacaaacatttgattaaggttatgtaagagtgaaatcaggatggctcacaacccattagccgtcattttcttactttaattgacaaagaaattgaaaaaatgaaagaagcatatgttgtgcttgaatgtgaagagtgctagactagaatcaaaggcctcttagatttggctgtgtcatttgggctcatgaaaacacctctggaaatctctttcagtgcaaaggagctggactagttgatctctcaggtttcttccaactctaaaatatctccagtctgtgccttggaaacatcttaggtgaaaatctaggaacagttaacctaatttgcacccttaaaattctgccatgagctgcttacaactcaaaacaagtttatcttactcagttactaattataaaccatccagatttcagagctgtgagtactgggtgaagcattgaaggtatgcttttgaagccattacatatggcagttactgagctgaaaggattaaatgctgcagcttccccagttgcccttcctccatgagagcagtgcctgcccccagcattctgtggcacttggaagacaagacagaggccaaatgcagatttttaccctgggcttccctctacagtgtggaactcaggttgtttcttctttcctccctgaaatgacatgagtttgcagcggatggtgaactgaagaaaccataggaggctctgtcttcttgcctgaatttcagttggaagcttggagatttggggttcaacagagataaggaagtgtaagccttcatcccgtctggtggttggcgatcacacaccgctctgtgctgaggctaatggccatgatcagagttgaccaaaaaaaaaaaaaaaaaaaaatacgggttgtccaagcaaattgatttccatacctatagagagcatacctttcttcatcagtattttcttccattcttccaaaaaattactttgggctctaacagccattcccgtgatctttacctctccttggggaatgcagataatttgaatagtggttttaagctatttttcttggaatacagaagttctgataagcccttcaaagacccctgagggcaagaagagggaaggtagtaggcagggctcaggccctctttaacacagacacatgtacataagtaacacatttgcaccaacactggaaggaaattcaatatattttaaaatgactttaactcctagtgatggaactatagatatttttttacagcccttccctgaatgttcacatgtgttttttatatatatgtgtgtgtcacgtatttgtatatgtgtatatacacatatatatagaaacacgtacatatttgtatgcatatttgtacatataggtatatatgtatgtaatgtgtacatattggcacatgtgtgtgtttgtatatgtatatatcagtacatatagatgtatgtatatatgtatatattttttcctccaaaataaacaataaagaatgtcttcttagattgcaaaagtgaattgtctgagttctgctaaggaaaaaggacttctgcttctgctgcctgtgaggactgtgctgtcagcagtcatggcccttcaggccctgcacctcgaggcagagccctcccccggccatggccagctctcctaaccaagtgtctctttcccccagaatggctgcagtctgtccaggccaccatgatcctgtcgatcatcttcagcattctgtctctgttcctgttcttctgccaactcttcaccctcaccaaggggggcaggttttacatcactggaatcttccaaattcttgctggtaagttgtggatggtaaagtccatgtggaagcggggtgcatccaagtctgcggaatgattagtttagtagaaggatgtggcctcagaatgactgatgttcatgagtctccccactggatgctttccataaagtgagggtgggtgcttgtatgtgtgggtgtgtacctgtatgtgtcttagaacttgggacttagaactctccccttctccctggaatgagatgcatatgaaagagaacttagaggatctggaaggaaggtccccacccaagccaggcgtatcaacaggaatgaaactgcaatctggacacataatcagaggtgaatactgaggctatctgtagagcaaaggtcaggcttgagagctgtttctgtagattacattatgcctccagaaaatggccctgatgtgctaagaactagcaaagtagttatcaggtatgtgtcttccaccaataggtagtgatgaagccacactgacaaattctcaccttccttgcttccagttcctagattctactgggctttgattgactgttgtcatcctctggtgtcttcattttgacactcttgtgtcacatattgtcatttccaaacatggggctatgacaacacatgaaaacacatgagaggtctccttaatctcctgcctaaactgtcttcaagttccctctttaaatacgttattaatatgcatagtgtgcagagtcctagaaacttctgttacacagggtgacatcttccaactttgtctctggattctgcctagcatcttacatgcttacatcttacatcttacatcttacatcttgcattctgcctagcatcttacattagctcttacatgtctgtctgttgacttactgttgactgaaccagcagggcattggagagaagtaagagctagatgtagtggtggattctgtggtccaaattcatagatcacaaacttcatatgtaccagagtatgtctaggtactgggagatgttctcaattctgaccctctgagagggcaaaggatgtagcatctcttctctgagttggttgtcagaatgcccatggtaccatttcaccactctgtccccaggagcagtcattggaaggttgacgtaaatagggttgtatgggaagacacagcccaaggttagatgttggtgaccttgtctagaagacagagagttcccctttcctgaaaaaaggaagtaaatgattaaccacttctcattaaacactcaaatacaacatttcaatactcatggttttgagatttcaaaaccagacagtgctttgctacttacacatgtcttatgacaccaagccaagctcctggatggttgctggctctgttaaatgactaattatgcaaggagatatcatttctaggtacgttaaagtgaagagttacccttactcaattttcagttggaataaaaacaactgtaacatattctggggtttctttttttttttctcactcgttttagtttgatatcaaatcaaataatgatcatatccattgcatcagtggatatgccctcaagataatatggatttagaaccagaactttcataatgtatttctattgaaatgttagtttcataagcgatgattgggttttcatgcccatgtgtgagatgtgcctcgctcaaaccttgttatgatttggcacgttacccatctgatgtgaaaaaaattacattttatttgtacaggctcgttattttactgatgaataatttgagcccaccagaggataaatgaatgaccaaggtcacccagctcatgacagggacggttgagtgttacactgaatatagtgaggtacttcttatattttaaagacagaatgcaccaaaaaatttaaagaacacaaaatccaaggcagaagctctgccttttatattatcttttattggaactgatttacaatggaaggtaaatgcaaatttgcaccatgtattattctgaagttccaaacatctgtgatgaatacaagcctgtactataagacccagtcacattgaaaatatggagctgagaagaggtaagctgctgttgaatgggctccttgggatagccagtaccttcatcttcattcatcctgctgagctgtttcggctttaagttctttaacaatgtctttttagcaacatcattacatcattttaggccaaaactcaaagtccagagataagaacccttaagtcactcatgtaactgcactgtgtgttaaaagtatttcagttcagccaaacactcttctcctaggtattgcgatttaagtatatttactaatccactcttgcttcactattttcattctcctccaaagtcaatacaagatgtttagaactgtgctggaagtgcagaattccgaatgtaaaagcgcatgactttgtcctctttatcccctttacatctagctgcttacgtctcatgaaactgaattttcagttatctgttggtccacatttgaataagaaattatcttgaatttgaaatgctgagctgtaatagcagttgtaatttgtaagtcctgagagtgtcctgtcctccgttgttaatcccagtcaagatcatctgagagttggtctccagggaacctcagatctctaggatgttgcactggaaatggctgcaggatctttccactaattctgagaactgaaagagttaggaactctatttggagagttcctggttcccttatcgtgtgacagttctaagtcaattttgtcatgtggttttctgactcacagactagtaagaagttagtaattagagagctaagtagattagggttgttggagatgagaaacccacgttttgggaaaacctggcaagtgacaacttaacatcaaggaagtagtcagaaaagctaaaactgacaaacagaaggtagaagaaagtagctccacactcatgggatgtgaaatctacaagcgtgcatgcccggcaaatgcctctccaatgcactggagcgttttaagtggaaaccactagaatctctgtgtagtctccggaagtggctgtgagggctgcattatctctgcacagcttcctcttggtgggcccagctgtgatctttatggatggcacacatcagctttcaggaaaagcacatgaaaggtgctagggctcttggagctgactgtaggtttgggagttgtctgtctccttgctctagattacagctctgtgtgttgtgtggggtctccatggtttgccaaattatctcttcctcacttagccacaaggctgacagttaggaactatctcttcttgattgcattaggttggctgcttcctgaatgcatatcaaaaggctccttcctttagttcagtgctttcaacctgagctgtgcatcagaatcacctgaggtcctttaaaaaaaaaaaaaagacagtgggcggggcgcagtggctcacgcctgtaatcccagcactttgggaggctgaggtgggcagatcacttgaggtcaggagttcaagaccagcccggccaacatggtgaaaccctgtctctactaaaaataaaaataaaaaaatagccaggcgtggtggtgcgtgcctgtagtcccagctacttgggaaactgaggcagagaagaatcacttgaacctaggaggtggaggttgcagtgagccaagatcatgccactgcactccagcctgggggtgacagagtaagactgtctcaaaaaaaaagaaaaaagaaaagaaaaaagacagtattcaggtctcatccctggagactctcatttaatagttgtgggatggatccactgcctaggtgactctgatgtgcatttagggttgggaaccactgacatagccattaaactgtccctaatcccactgtaaggttttctaggatattttcccagaaataactaaaccaccttcttagagaaggaacatcctgatcctgcgtctggactttggagtcattcttattttcagaacctatagccatctattccttgacaagatctgttgggttgggttgcactagactggaaaacatcaagaaattaatctagacacagacctaaaaggaagatttgcacgttttgatttattttactgcttacacccagcatcaagctccatgtggggcacatagaggagcctgaataaaactattattggttggatgattagataattgtgtttcctcggcagaatcaaactcaagtcaaatgtgtggttaccgggattaagaacagaaagaatagaggggactcctgagtgagtttcactttctctctctttttgttattgttgttcatttgttttgttaatagaaagatcaatatagctatagagcatttaaaataaaaggatttgggccaggtgtggtggcgaatgcctgtaatcccaacactttgaaagactgaggtgagaggattgcttaaagccaggagttcaagaccagcctgggcaacaaagcgagatgccatctctacaaaaaatgatttaaaaattagtggggtgccttggagcacgcctgtggtcccagctattcaggaggctgaggcaggaggattgcttgaggctgagaggtcaagactacagtgaactatgatcaggcccctgcacttgctccagcctggtgacagagtgagaccctgcctctctaggaaaaaaaaaaaaagaatttggtggggggggattaataaaagttcagtgccatcctgttcagagtgattcaaaggtggcttaagtcaaataccacatttagaaatttttgttagggacggatgattatggatgtctcactggccatgcccaaatcagagtcaatgctatgggtggctttctaggcagcaatggtcatttggatactgaaaatgtaaaaggagtgggcttcaatcacagaaacacagagaagtctcttgctttcagaggaacaggcctcacagccccttcctgccctcccttgttgccctgaggatgaagtgggagggagaaaaaggcacccactcatcaacccaacatcatagctgcaccttccagtgaccaccctggtggtctcactgacatccctttccagccaacttctctctgacttctgccccaggctctcaaatgaaagtgcttttgcgaggttaccaaagtacactttgaagtctttaatttgttggatcactctgctcctttcaatactgttagctacttactctttgaagctctattcccctggcttctgagacatcgctgtgttcccacttgcctgagtgaacacaccaggcggtcatgctggcctctcctctctccctcaccccacagccagccttctactgaatcctgcatttgggtagcatcctccgtaggcattacgcccatttctttgtcttgactcactaaccccagtgcagctatgcaaaggcctcctcatgcaccttccagctacctgccttgtccctgcccctgaatccattttctgcaccatggccagagtgatcattctaaaacgtgcgtctgatcatgtttctcctctgctgaagtttcctcagaggcttctcatcacagcttccttaacatgtcatgtaaggccctctctttcctgacccttagtgagctaatcagcctattatatgagagtccgtgtggcttctccagttctccagtttggactcagcgcccgtctatgctcttggggcatctggtgcatttccttccctctctcgaaattccatcgaactatattgaaattatatgcaaatgtctgtcttctagacacacagtccttaaggtaggagccatgtctcacttatcttggtacatctagagcagcagctagaacagggcccgcatgcaataggcactcattaaatgttcactgaaccaaagggaatggagatgataaggatgtactgggaattccctcagctacttcctttgaccttggccccttgggtgcttccttccagaggctctgggctctaatcactctcatggggttgcagtcactgttaaaggagcttaagactttctcttcaaaagggctttaggcagaacttgcaggaagttgttgcagacctacccatcctgagacagggagaaactcttgtaagttgaatgctcagcacatttgtattgtctggacagggtcagtgtccttctgcttaaagatgacctatgctcccagactcaggcccctaccagggagtcccggtcattgccaaagagcagaacatctgcctgtgcctcagggcctcacttacccttgccacagggacctggtgatacatctccacctactggttgctgagaaagtgagtcacagtccacttactaggggtatttggcttttggagatgactactggatgacattaactgtcttgggttgcagacagagggaacccagccaaagaatcatccttttctctatttcagggtacatctattgctttacatgcagacaatcttgtaataatatattccctaaaacatcagtctcatgacaacaatcatataaagtgtgtatcctctctttggctttgtagatatctaagtttactgcttatcacggttaagcttagagtcattcacttctgagattctactaagatgaaagtcatacacattaagctgtgtagttagtcgctgcacttctctatactgcctctttctatccctcttgttcaaggatggaatctggtatctcctcttagtcagtgaaatcggggagtagctggtccactcagctcctgaggcatttctcatgccagatctggttagacagcccatttgggagccctgcctgcatgatgataagtgttgtcctgccctgctagcactctgttaacacctttctctctgccaaggtcatgtttccttttttatagccctgccttcattagataagtcagacagagcccaagagacaacttcagtatttcttaaagacaagagttagcactttggagatgcaagccgtggaagagtggggcaagataattaaggatcctggacctcaaggcaaataaagtgtgtccccagcagatcaaaactgctgttttctgcaatcaacaattaacccgcaatgatttcgctcctgacatggccatctttgctgtcttctgaacttcctgtaggtggcaggtcctggatgctgtcccattttggttccaagactattgtgtggctctcttgacaggggccagtcaagtggcagttttctcctctgagttgcaggaggacaggcttaacagggtggttcatgtggcgtattcccacttctgcactgtcttcaaacaaagttgcagtgtccagtaaaacagcagcccaaatagcagtgaggttagatgtaggtggccgggcggtgggggggcgcgggtgcattgggaactctggaactgcatgaatcccacacggcatactggatttataatagagtcactcagagcttctcaaagaccctgttttcagggaggaaacagaccaggctttgtgcagctccaggctggggtgctgacatcactggacccctccttgtggggggacgctgtctgtcacgtgagctggggccatcagtttgagcgtggctgctccacagggcccaagatggaggcttttcttctctttccaacaccgaagggctgcattggtgggccagggagggtggcctgacccacctgcatatccagtgccctttagccttctttgggcttcaaatgcaaccttggggcacccagggaaatggagcttgcctttgatcatcttccccctctgcagcgtggcttcccagtcatactgtcggctgcatccttattcctcactttctttttccctctccacacatttctttgtctgtttggcagtgcccataggcattgcttgcttcacctggtatgtggcaactctgttagggggaccataggcccctgtggtctgcatggagcttaatccttttaccatggcgtgactccaataatggtaaaatgtcacttcacttccattggctttaggtaatgccaccactcacttgtagagtggcatatagatttccaggggtttccatacccaaccacccttggaaagagacaggtaggtttttcttgcagcctgaatgcctgctggccatgtagtgtggcctgggaattggtgacagtgaaagaaagagaaatagggcagaaaatgtaaagaaaaccctcaggtattaaggcctaggtggccaagattggaaatagagagcaagttgttttccttgttcccatatttttgtgctacctcctttcaattctggacctggaagcagatttccttccagaggtagaaatgttcttcctacccagcaattgtcagcatccggggtggcggagagggggccgctctgccatggactctccgtcacccagcttgtccctctccttccccaggtctgtgcgtgatgagtgctgcggccatctacacggtgaggcacccggagtggcatctcaactcggattactcctacggtttcgcctacatcctggcctgggtggccttccccctggcccttctcagcggtgtcatctatgtgatcttgcggaaacgcgaatgaggcgcccagacggtctgtctgaggctctgagcgtacatagggaagggaggaagggaaaacagaaagcagacaaagaaaaaagagctagcccaaaatcccaaactcaaaccaaaccaaacagaaagcagtggaggtgggggttgctgttgattgaagatgtatataatatctccggtttataaaacctatttataacactttttacatatatgtacatagtattgtttgctttttatgttgaccatcagcctcgtgttgagccttaaagaagtagctaaggaactttacatcctaacagtataatccagctcagtatttttgttttgttttttgtttgtttgttttgttttacccagaaataagataactccatctcgccccttccctttcatctgaaagaagatacctccctcccagtccacctcatttagaaaaccaaagtgtgggtagaaaccccaaatgtccaaaagcccttttctggtgggtgacccagtgcatccaacagaaacagccgctgcccgaacctctgtgtgaagctttacgcgcacacggacaaaatgcccaaactggagcccttgcaaaaacacggcttgtggcattggcatacttgcccttacaggtggagtatcttcgtcacacatctaaatgagaaatcagtgacaacaagtctttgaaatggtgctatggatttaccattccttattatcactaatcatctaaacaactcactggaaatccaattaacaattttacaacataagatagaatggagacctgaataattctgtgtaatataaatggtttataactgcttttgtacctagctaggctgctattattactataatgagtaaatcataaagccttcatcactcccacatttttcttacggtcggagcatcagaacaagcgtctagactccttgggaccgtgagttcctagagcttggctgggtctaggctgttctgtgcctccaaggactgtctggcaatgacttgtattggccaccaactgtagatgtatatatggtgcccttctgatgctaagactccagaccttttgtttttgctttgcattttctgattttataccaactgtgtggactaagatgcattaaaataaacatcagagtaactcac
